United States Patent Application Publication US 2026/0226475 A1, published August 6, 2026 (application 19/460,924).

The application's sequence listing, which the Patent Office published only in electronic form, follows.

SEQUENCE LISTING (1084 sequences)

SEQ ID NO: 1 - RNA, 8853 nt, Homo sapiens
  source 1..8853: mol_type = genomic RNA
agtggcaggagcgccgcgcaccgccagccgcagggggcgtgggatgggggcggccggggaggggggcgcccacactgactagagccaaccgcgcacttcaaaagggtgtcggtgccgcgctcccctcccgcggcccgggaacttcaaagcgggccgtgctgccccggctgcctcgctctgctctggggcctcgcagccccggcgcggccgcctggtggcgatgacccgggcgctctgctcagcgctccgccaggctctcctgctgctcgcagcggccgccgagctctcgccaggactgaagtgtgtatgtcttttgtgtgattcttcaaacttcacctgccaaacagaaggagcatgttgggcatcagtcatgctaaccaatggaaaagagcaggtgatcaaatcctgtgtctcccttccagaactgaatgctcaagtcttctgtcatagttccaacaatgttaccaaaaccgaatgctgcttcacagatttttgcaacaacataacactgcaccttccaacagcatcaccaaatgccccaaaacttggacccatggagctggccatcattattactgtgcctgtttgcctcctgtccatagctgcgatgctgacagtatgggcatgccagggtcgacagtgctcctacaggaagaaaaagagaccaaatgtggaggaaccactctctgagtgcaatctggtaaatgctggaaaaactctgaaagatctgatttatgatgtgaccgcctctggatctggctctggtctacctctgttggttcaaaggacaattgcaaggacgattgtgcttcaggaaatagtaggaaaaggtagatttggtgaggtgtggcatggaagatggtgtggggaagatgtggctgtgaaaatattctcctccagagatgaaagatcttggtttcgtgaggcagaaatttaccagacggtcatgctgcgacatgaaaacatccttggtttcattgctgctgacaacaaagataatggaacttggactcaactttggctggtatctgaatatcatgaacagggctccttatatgactatttgaatagaaatatagtgaccgtggctggaatgatcaagctggcgctctcaattgctagtggtctggcacaccttcatatggagattgttggtacacaaggtaaacctgctattgctcatcgagacataaaatcaaagaatatcttagtgaaaaagtgtgaaacttgtgccatagcggacttagggttggctgtgaagcatgattcaatactgaacactatcgacatacctcagaatcctaaagtgggaaccaagaggtatatggctcctgaaatgcttgatgatacaatgaatgtgaatatctttgagtccttcaaacgagctgacatctattctgttggtctggtttactgggaaatagcccggaggtgttcagtcggaggaattgttgaggagtaccaattgccttattatgacatggtgccttcagatccctcgatagaggaaatgagaaaggttgtttgtgaccagaagtttcgaccaagtatcccaaaccagtggcaaagttgtgaagcactccgagtcatggggagaataatgcgtgagtgttggtatgccaacggagcggcccgcctaactgctcttcgtattaagaagactatatctcaactttgtgtcaaagaagactgcaaagcctaatgatgataattatgttaaaaagaaatctctcatagctttcttttccattttcccctttatgtgaatgtttttgccattttttttttgttctacctcaaagataagacagtacagtatttaagtgcccataaggcagcatgaaaagataactctaaagttaagcatgggcaggagttgacttcatccaatctctatgttatgtttaattttattttgaaagcaacacctcaactcatctttttatttaataaggaagaaatatattacaaaagtataaaataagctctataaaaatgttatagtcattaagtttttattttacttgaaccaagagcacatgaatgaacaggaaaagatgtaaaaacatttttttctgagatgaaaacatattaattaaacatgcaaattagagcatgctatctttaggtgatgcaatctatgtttccccctttttaagttagcaggactttttaaaaataaatattgctctaaactttaatatatcgaacgtgagagtggagctgcttagtggaagatgtaagtgaggtgggtgtcccatgtgcttggtctccccttctgctgttctcctgttcttcataatccactactgcagcagtccctgaaccactaaacttgttcctttcatttacaaaagagatacctgacatcctgagacactgagaaatgtcctgaagtcacacagctaatggcagaactggcactaggtccaaatcttgtgataatgaacaccgtaaggttagctagcttcctactttcccttgaatagtgcttttctccctatgtaatatcttttattatgatatttgtggtttagaaggcatattgagttattttgcagaatcataatggacccgcacaaaatctcagaaccatatctgttgacattttttctcatagaaatatcatggttaccccatttgttaatgagcattaatgttttctgaacacttccaaagattaatcaaacataaatattcattgtctgaaaatgtctttaagatacaattcagaggtccctatttcctttgtacatacacacttagaaagaaaagacagaaaaggaagaggaaggaaggaaatattttgagaatatattgagaagaattaagaaaactcttcaatgaagtgttaacaaccaaaccctacagacggtatcagaaacagcaaatagatattcctctaccctttcacagtgagtgagtgagtacagaagaatgctcatgatagttttgccttcattctactttctgtggacacagagtaatgaatatttaatgggacattaaatatgcccttcaaatctataattttactttggtaaacgagatttaacatgatgtcttttatgctcctaaaacatcttttttcaaactccattccttagaacattcttctactgagatgatccaagaccaaaagtgttctttggtacttgcttataaagtgatagtacatgttagcatataatgtattttgaagagtgaagtaaatgctattgataacagtaaaaaaaaaaaaaaaaactaataacagtaaagaaatgctacttgatttttttttaaactggattgctcagattacctgatcgtggtggaacccttttattaagaggaggggaaactttttactatcccatatttaactgttctataaagcaaagcacagcttgggtaatagcgttctgaaggatatacttctgtattttctcatagagtacaatttagtgattatgcttcatttcactatggaaatatgttactgaatctatcttcattttactgagttgaaataaggaaggcaaaaaactgacagctatggagtttgcgtgtacttccatactcgttaatgctctcatccacttattaaataatcatagagcacccatatcttgcttgccacaatatcgggtacaagagggaatacaaagatagataggtcctgccctcagggattttaaagtctaatttgggaatgggaatagggatgtgagtgtgtgggggaagagattaaattgacagataaaatacgaagtgggatgtcttgagttctgcatgacagtgggtttctaggataggtctgaaaattgctttcatttgcaacacatttagaaagtagctttatttggatattacagacaatctaaatatatcatcagtttttaaaagtgcctatgtgaagtgatttttaaaaagagcctatgtgaaggggtaatcttgcttgttcttgttactaatttctcatagattgtttttctgcatatataagaacgaaattatttatttactatggttgtacgtgcctcaaataaacaagaatgatatttcctgttttatttacttatgttgggtaaatatgcttattgaatttttaagagaggattttttaccatctccatttttcttgtcattatgttttgtagcttatttgagggtgtctaaatataatttcatattttattggttcaactttcactctgaagaaatccgtatgttagtacattttgaggtatttttcttgttcttgtgttgtttaactatgactcctaactgagtagtcttatatttcaattacaaaatacattttttaagaaagggaatagagcagcaaaaatgataaggaaaatgttaaaagttgtaatatttcctttactcttaacaggattatatatagaacatgctcacttacaaaaataggatgatgaagtttagagcataaggcaggcttcttgtatatacttatgctgtcaaatgttatattgtttttaatggagtcccattgtgtaatatttatttcttttacattttgttataagcaaaaaaaaaaaaaattctccttaggttatgttcagagtatcagtgttctttactccttacagatattttggctttggggtataatacaagacttgggaaaacactattatgaattttcagtactgtataaagtggtgatgggatttaaatgcagcatcactttctgaaaataagagaaacattatttgttgtcagtatttcagcatgaacttgttgccttgtaaattttgcctttaagtttgtaattggtacagattctgttgtatgctttcttctatgtctaaaatatttggcatgtcacatctagaattcttaatttatgttctgacttgagagttaagtgaaacatgactgtcgtgcactattttaggcatagcacttgcttttcatctttatactttcaattaactttgcattttaaatttccatgattgtatgaaaatagtaacctggttgcagtatctgaaaaaattaaaattagcttttatttaaaaatgaaaatctacaatagattcattaggttagaagttccagaataatttattattttattacacctactattgtagaattactaataaaacaaaacaaaactactcctattttcctggaattttgccaccatgtgacttattggggcagagaaaactcagggttgtctttgagtctgcacaaaagcaccagggaacctgcttagcaaatcgtctgaaaacagggagctgatgtttgccattatacaaagtttgagtaaacaacttaaaattgcttgttagggcatagtctttgattgaaataagtatgagaatgtatttggctaaataaatgtatttaaaatatacaaattttatttcccactggaaaattaagaaagtagcagtaccaaatgaataaaagctggcagttgatgtcttcaataatcattcctttaaaataaattcacaaacacatcattacaagctacttagaaatgtttagtattcgtatcttaaaatggcaccattgtggttttcaaagatattttaaacatcttttgtgaaacatactatttctgtttgacaatgctttgttctagctctgtgtgctgatacctacatggagtttttctgctattttagtgaaaacagtaattcttttatcttgagagctgcttctaaataacaaaaaagttaattggaatgtaagtttttaaaaaatgttaatattaaatagaatttttataatatgggcatttttcaaaacattttaatgaaaatatatagatatttgactttctttttttcatctagccttgctttatatttcattatttttctcactttttttcttaatattccctcactatctttcaacattatcattagttcctaattttaaaaataactcttatttaacttaaccgtctggaatttagccttctaatgaaagagaatcccttagtactctcagagattatataaagttattccaattttgtgtagatgacgaaaccaaggatcagagattaaatgactactagttactagcagaactcttatgaaagcctggtggtgacacccagcactgttccctgccatatccccaacttttactgattaaaaattaattcgcatgcatctaaacctaccttgaatgcacactaacgtaatgtgccattcaatgatgatgataaaatcccacttttctttgggtttctactaaaataatttactcactcagagtgaggtcaatgagaaaaactaaactaggctaagaaagagttgtagaatggttgttgagctaagtaggcaaccactggggtgctgataaaattaatggataaaatttaggaactgtgagagtatagaatttcttagtgcaagtaatgattagagaagcttcctgacatcccccaccctttctgtaaggactgttctttctctttgtaccttggaatgggggtgaaaggtgatttgatagctgaatttgggactatgtccagtgggatattatctaacttttctctctttctcttttttttcccctcagtttctcattagtttgtctttggcattcatcttcttttagtgcattaaaaaatgtttggcagatctcatcaatcccaagtcactctataattcctgtatttctttagttgtcgtttaacctgtccaaacttctacacaatgaacttcttaacaagattttaagttctctgtataagaggtttcacctcataacttctccagtaatccttcatttggcactatagagtatttgttaatggcagagatgatttttcttttaaaacctaaaaagactagctgttatttgtattctagcttttagctaacatataaagaatgtctacttttgctttaatgctaaattccgcttgagaaatagtaactgggaaagacaatttgaaatatatgccccataatgtgattgttaaatttatttctgctgttccataccattgctttgttttgcttttgacaaactaagccattatgctattagtttggaatataatactacagcaaaattaggtaacaatccctattttaaaattcccctaacaataatagaactgccagcatacttttctctttcagttgtagatgaatacattcgagagaatatgagctgtatttcatcctagattttaatattttcagatgtgactgtatttcctgatcattggtccaagttgtcctaaaagaaatttttctctccagacctaacagttttaactgcaagagtttactgtgggttatgttaatctgaattttaatagggccactaagaatctgagtgccttaggagattacccttatacccactgccatcacatccagtcaggcctgttgtgctctatataaatcttcccagctgaggggcaggtgcgggctaaaatccaactgcaattggctcccagacataattttatattttacagagaagcatcttattggcttatatgtgtttaaagaatggtctggcttatacatcttcagaaaatgagaattaaaaagtcaaaataattcttgacatctacagattgaacaaagaacttagaagaaataatactttatcttttcatcctggcattcctgagagaagagaaattgattgtttatcatgttggtttaatttttcaacccagacaatctgcagcaaggcacatggaccccaattttgatatcgtccatacagttttcattctatgcatggagctaattactgactttgcctgtaaagagaggattgtgtgcctaaattttgtctaacaaatgcaagcgtagaatgacatttactaatatttctatttcttccataggctaaataatagtaactaagtatttttaaggacacagccctttttttctctttatacaaaatgagagtatctgagccaaaatattaaattctagttcttttccgcaatgactagtgtcaagctcatgtactcttctgattctagactggagaagattattcaaacttgatctgtgtttcaggtttttaaatgtcctaaaaacagaaaattagattcagatctcaaaaaaggaattttggattgactttcaaagtactaatactaattatacttttcttttggtagcgtgactcttcttatacctaagaacatattacaaatgtcaaaaccattgcattttgacattgcaaaacatgccttgaactcttgaactactgtgaaaagaatcaccgttgtaaagactttttgtaagctagctgatactcttaagtatgtaaaaagattgtctttcagccgacaggcccaaaggaatgtatataaggaaggaatatgaaaaaataaattaggttttaaaataggaattgggcaataaactgtatcaaaaatatgtagatggattttagtagttgtaatttaaatgtggaaggtgaagagaatttcaaactccaaagagaaatgaatgatattcagatgtttcattaatttctagtctgtgaaaatatgcattttatagtaatatgtatagacttattttatttagaaataatagtgttttagaatttattaaaaactcagtgatagcctttataccaaaatgtttaactttaccaacagcaagtcataaaagtatttattttaaagctttttaatattatcgtgtaactttcatctgtcttcagatgtaaataattatctgcctaaatgttatatttttatgtatgcattttctgaaaatgtattgttttgtaaagtgggaaagataataaatcaagcacttcttgcacttgtttctgtgaagcatatagaactctattttaaataaaggaagatgtgtcgta

SEQ ID NO: 2 - RNA, 22 nt, synthetic construct
  source 1..22: mol_type = other RNA
tttttcacagccacatcttccc

SEQ ID NO: 3 - RNA, 22 nt, synthetic construct
  source 1..22: mol_type = other RNA
ttgcagtcttctttgacacaaa

SEQ ID NO: 4 - RNA, 22 nt, synthetic construct
  source 1..22: mol_type = other RNA
tcagaagacttgagcattcagt

SEQ ID NO: 5 - RNA, 22 nt, synthetic construct
  source 1..22: mol_type = other RNA
tacagaagacttgagcattcag

SEQ ID NO: 6 - RNA, 22 nt, synthetic construct
  source 1..22: mol_type = other RNA
tgacagaagacttgagcattca

SEQ ID NO: 7 - RNA, 22 nt, synthetic construct
  source 1..22: mol_type = other RNA
ttgacagaagacttgagcattc

SEQ ID NO: 8 - RNA, 22 nt, synthetic construct
  source 1..22: mol_type = other RNA
tatgacagaagacttgagcatt

SEQ ID NO: 9 - RNA, 22 nt, synthetic construct
  source 1..22: mol_type = other RNA
ttatgacagaagacttgagcat

SEQ ID NO: 10 - RNA, 22 nt, synthetic construct
  source 1..22: mol_type = other RNA
tctatgacagaagacttgagca

SEQ ID NO: 11 - RNA, 22 nt, synthetic construct
  source 1..22: mol_type = other RNA
tactatgacagaagacttgagc

SEQ ID NO: 12 - RNA, 22 nt, synthetic construct
  source 1..22: mol_type = other RNA
taactatgacagaagacttgag

SEQ ID NO: 13 - RNA, 22 nt, synthetic construct
  source 1..22: mol_type = other RNA
ttaacattgttggaactatgac

SEQ ID NO: 14 - RNA, 22 nt, synthetic construct
  source 1..22: mol_type = other RNA
tgtaacattgttggaactatga

SEQ ID NO: 15 - RNA, 22 nt, synthetic construct
  source 1..22: mol_type = other RNA
tggtaacattgttggaactatg

SEQ ID NO: 16 - RNA, 22 nt, synthetic construct
  source 1..22: mol_type = other RNA
ttggtaacattgttggaactat

SEQ ID NO: 17 - RNA, 22 nt, synthetic construct
  source 1..22: mol_type = other RNA
tttggtaacattgttggaacta

SEQ ID NO: 18 - RNA, 22 nt, synthetic construct
  source 1..22: mol_type = other RNA
ttttggtaacattgttggaact

SEQ ID NO: 19 - RNA, 22 nt, synthetic construct
  source 1..22: mol_type = other RNA
tttttggtaacattgttggaac

SEQ ID NO: 20 - RNA, 22 nt, synthetic construct
  source 1..22: mol_type = other RNA
tggttttggtaacattgttgga

SEQ ID NO: 21 - RNA, 22 nt, synthetic construct
  source 1..22: mol_type = other RNA
ttcggttttggtaacattgttg

SEQ ID NO: 22 - RNA, 22 nt, synthetic construct
  source 1..22: mol_type = other RNA
tattcggttttggtaacattgt

SEQ ID NO: 23 - RNA, 22 nt, synthetic construct
  source 1..22: mol_type = other RNA
tgcattcggttttggtaacatt

SEQ ID NO: 24 - RNA, 22 nt, synthetic construct
  source 1..22: mol_type = other RNA
tcagcattcggttttggtaaca

SEQ ID NO: 25 - RNA, 22 nt, synthetic construct
  source 1..22: mol_type = other RNA
taagttgagtccaagttccatt

SEQ ID NO: 26 - RNA, 22 nt, synthetic construct
  source 1..22: mol_type = other RNA
tcaaagttgagtccaagttcca

SEQ ID NO: 27 - RNA, 22 nt, synthetic construct
  source 1..22: mol_type = other RNA
tgccaaagttgagtccaagttc

SEQ ID NO: 28 - RNA, 22 nt, synthetic construct
  source 1..22: mol_type = other RNA
tcagccaaagttgagtccaagt

SEQ ID NO: 29 - RNA, 22 nt, synthetic construct
  source 1..22: mol_type = other RNA
taccagccaaagttgagtccaa

SEQ ID NO: 30 - RNA, 22 nt, synthetic construct
  source 1..22: mol_type = other RNA
tataccagccaaagttgagtcc

SEQ ID NO: 31 - RNA, 22 nt, synthetic construct
  source 1..22: mol_type = other RNA
tgataccagccaaagttgagtc

SEQ ID NO: 32 - RNA, 22 nt, synthetic construct
  source 1..22: mol_type = other RNA
tagataccagccaaagttgagt

SEQ ID NO: 33 - RNA, 22 nt, synthetic construct
  source 1..22: mol_type = other RNA
ttcagataccagccaaagttga

SEQ ID NO: 34 - RNA, 22 nt, synthetic construct
  source 1..22: mol_type = other RNA
tttcagataccagccaaagttg

SEQ ID NO: 35 - RNA, 22 nt, synthetic construct
  source 1..22: mol_type = other RNA
tattcagataccagccaaagtt

SEQ ID NO: 36 - RNA, 22 nt, synthetic construct
  source 1..22: mol_type = other RNA
ttattcagataccagccaaagt

SEQ ID NO: 37 - RNA, 22 nt, synthetic construct
  source 1..22: mol_type = other RNA
tggagccctgttcatgatattc

SEQ ID NO: 38 - RNA, 22 nt, synthetic construct
  source 1..22: mol_type = other RNA
taggagccctgttcatgatatt

SEQ ID NO: 39 - RNA, 22 nt, synthetic construct
  source 1..22: mol_type = other RNA
taaggagccctgttcatgatat

SEQ ID NO: 40 - RNA, 22 nt, synthetic construct
  source 1..22: mol_type = other RNA
ttaaggagccctgttcatgata

SEQ ID NO: 41 - RNA, 22 nt, synthetic construct
  source 1..22: mol_type = other RNA
tataaggagccctgttcatgat

SEQ ID NO: 42 - RNA, 22 nt, synthetic construct
  source 1..22: mol_type = other RNA
ttataaggagccctgttcatga

SEQ ID NO: 43 - RNA, 22 nt, synthetic construct
  source 1..22: mol_type = other RNA
tatataaggagccctgttcatg

SEQ ID NO: 44 - RNA, 22 nt, synthetic construct
  source 1..22: mol_type = other RNA
tcatataaggagccctgttcat

SEQ ID NO: 45 - RNA, 22 nt, synthetic construct
  source 1..22: mol_type = other RNA
tgtcatataaggagccctgttc

SEQ ID NO: 46 - RNA, 22 nt, synthetic construct
  source 1..22: mol_type = other RNA
ttagtcatataaggagccctgt

SEQ ID NO: 47 - RNA, 22 nt, synthetic construct
  source 1..22: mol_type = other RNA
taatagtcatataaggagccct

SEQ ID NO: 48 - RNA, 22 nt, synthetic construct
  source 1..22: mol_type = other RNA
tcaaatagtcatataaggagcc

SEQ ID NO: 49 - RNA, 22 nt, synthetic construct
  source 1..22: mol_type = other RNA
tttccattatctttgttgtcag

SEQ ID NO: 50 - RNA, 22 nt, synthetic construct
  source 1..22: mol_type = other RNA
tattctagatgtgacatgccaa

SEQ ID NO: 51 - RNA, 22 nt, synthetic construct
  source 1..22: mol_type = other RNA
taattctagatgtgacatgcca

SEQ ID NO: 52 - RNA, 22 nt, synthetic construct
  source 1..22: mol_type = other RNA
tttcttaggtataagaagagtc

SEQ ID NO: 53 - RNA, 22 nt, synthetic construct
  source 1..22: mol_type = other RNA
ttgttcttaggtataagaagag

SEQ ID NO: 54 - RNA, 22 nt, synthetic construct
  source 1..22: mol_type = other RNA
ttttgaagtgcgcggttggctc

SEQ ID NO: 55 - RNA, 22 nt, synthetic construct
  source 1..22: mol_type = other RNA
tttttgaagtgcgcggttggct

SEQ ID NO: 56 - RNA, 22 nt, synthetic construct
  source 1..22: mol_type = other RNA
tacacaaaagacatacacactt

SEQ ID NO: 57 - RNA, 22 nt, synthetic construct
  source 1..22: mol_type = other RNA
taatcacacaaaagacatacac

SEQ ID NO: 58 - RNA, 22 nt, synthetic construct
  source 1..22: mol_type = other RNA
tttgaagaatcacacaaaagac

SEQ ID NO: 59 - RNA, 22 nt, synthetic construct
  source 1..22: mol_type = other RNA
tttggttagcatgactgatgcc

SEQ ID NO: 60 - RNA, 22 nt, synthetic construct
  source 1..22: mol_type = other RNA
tattcagttctggaagggagac

SEQ ID NO: 61 - RNA, 22 nt, synthetic construct
  source 1..22: mol_type = other RNA
tttgcaaaaatctgtgaagcag

SEQ ID NO: 62 - RNA, 22 nt, synthetic construct
  source 1..22: mol_type = other RNA
tatgttgttgcaaaaatctgtg

SEQ ID NO: 63 - RNA, 22 nt, synthetic construct
  source 1..22: mol_type = other RNA
taatgatggccagctccatggg

SEQ ID NO: 64 - RNA, 22 nt, synthetic construct
  source 1..22: mol_type = other RNA
taataatgatggccagctccat

SEQ ID NO: 65 - RNA, 22 nt, synthetic construct
  source 1..22: mol_type = other RNA
ttttcttcctgtaggagcactg

SEQ ID NO: 66 - RNA, 22 nt, synthetic construct
  source 1..22: mol_type = other RNA
ttttttcttcctgtaggagcac

SEQ ID NO: 67 - RNA, 22 nt, synthetic construct
  source 1..22: mol_type = other RNA
ttttaccagattgcactcagag

SEQ ID NO: 68 - RNA, 22 nt, synthetic construct
  source 1..22: mol_type = other RNA
tagcatttaccagattgcactc

SEQ ID NO: 69 - RNA, 22 nt, synthetic construct
  source 1..22: mol_type = other RNA
ttttgaaccaacagaggtagac

SEQ ID NO: 70 - RNA, 22 nt, synthetic construct
  source 1..22: mol_type = other RNA
tacaatcgtccttgcaattgtc

SEQ ID NO: 71 - RNA, 22 nt, synthetic construct
  source 1..22: mol_type = other RNA
ttaccttttcctactatttcct

SEQ ID NO: 72 - RNA, 22 nt, synthetic construct
  source 1..22: mol_type = other RNA
ttttcacagccacatcttcccc

SEQ ID NO: 73 - RNA, 22 nt, synthetic construct
  source 1..22: mol_type = other RNA
ttctttcatctctggaggagaa

SEQ ID NO: 74 - RNA, 22 nt, synthetic construct
  source 1..22: mol_type = other RNA
tagatctttcatctctggagga

SEQ ID NO: 75 - RNA, 22 nt, synthetic construct
  source 1..22: mol_type = other RNA
tatttctgcctcacgaaaccaa

SEQ ID NO: 76 - RNA, 22 nt, synthetic construct
  source 1..22: mol_type = other RNA
taatttctgcctcacgaaacca

SEQ ID NO: 77 - RNA, 22 nt, synthetic construct
  source 1..22: mol_type = other RNA
tttcatgtcgcagcatgaccgt

SEQ ID NO: 78 - RNA, 22 nt, synthetic construct
  source 1..22: mol_type = other RNA
ttttgttgtcagcagcaatgaa

SEQ ID NO: 79 - RNA, 22 nt, synthetic construct
  source 1..22: mol_type = other RNA
tagtcatataaggagccctgtt

SEQ ID NO: 80 - RNA, 22 nt, synthetic construct
  source 1..22: mol_type = other RNA
ttatgaaggtgtgccagaccac

SEQ ID NO: 81 - RNA, 22 nt, synthetic construct
  source 1..22: mol_type = other RNA
tatatgaaggtgtgccagacca

SEQ ID NO: 82 - RNA, 22 nt, synthetic construct
  source 1..22: mol_type = other RNA
tttgattttatgtctcgatgag

SEQ ID NO: 83 - RNA, 22 nt, synthetic construct
  source 1..22: mol_type = other RNA
ttctttgattttatgtctcgat

SEQ ID NO: 84 - RNA, 22 nt, synthetic construct
  source 1..22: mol_type = other RNA
ttagtgttcagtattgaatcat

SEQ ID NO: 85 - RNA, 22 nt, synthetic construct
  source 1..22: mol_type = other RNA
ttaggattctgaggtatgtcga

SEQ ID NO: 86 - RNA, 22 nt, synthetic construct
  source 1..22: mol_type = other RNA
tatttcaggagccatatacctc

SEQ ID NO: 87 - RNA, 22 nt, synthetic construct
  source 1..22: mol_type = other RNA
ttcgtttgaaggactcaaagat

SEQ ID NO: 88 - RNA, 22 nt, synthetic construct
  source 1..22: mol_type = other RNA
taactttgccactggtttggga

SEQ ID NO: 89 - RNA, 22 nt, synthetic construct
  source 1..22: mol_type = other RNA
tttcacaactttgccactggtt

SEQ ID NO: 90 - RNA, 22 nt, synthetic construct
  source 1..22: mol_type = other RNA
ttacgaagagcagttaggcggg

SEQ ID NO: 91 - RNA, 22 nt, synthetic construct
  source 1..22: mol_type = other RNA
ttagtcttcttaatacgaagag

SEQ ID NO: 92 - RNA, 22 nt, synthetic construct
  source 1..22: mol_type = other RNA
taagttgagatatagtcttctt

SEQ ID NO: 93 - RNA, 22 nt, synthetic construct
  source 1..22: mol_type = other RNA
tacaaagttgagatatagtctt

SEQ ID NO: 94 - RNA, 22 nt, synthetic construct
  source 1..22: mol_type = other RNA
tacacaaagttgagatatagtc

SEQ ID NO: 95 - RNA, 22 nt, synthetic construct
  source 1..22: mol_type = other RNA
tatcattaggctttgcagtctt

SEQ ID NO: 96 - RNA, 22 nt, synthetic construct
  source 1..22: mol_type = other RNA
taatactgtactgtcttatctt

SEQ ID NO: 97 - RNA, 22 nt, synthetic construct
  source 1..22: mol_type = other RNA
tacttaaatactgtactgtctt

SEQ ID NO: 98 - RNA, 22 nt, synthetic construct
  source 1..22: mol_type = other RNA
taagtcaactcctgcccatgct

SEQ ID NO: 99 - RNA, 22 nt, synthetic construct
  source 1..22: mol_type = other RNA
tatgaagtcaactcctgcccat

SEQ ID NO: 100 - RNA, 22 nt, synthetic construct
  source 1..22: mol_type = other RNA
ttttaaaaagtcctgctaactt

SEQ ID NO: 101 - RNA, 22 nt, synthetic construct
  source 1..22: mol_type = other RNA
taacaagtttagtggttcaggg

SEQ ID NO: 102 - RNA, 22 nt, synthetic construct
  source 1..22: mol_type = other RNA
tagaaaagcactattcaaggga

SEQ ID NO: 103 - RNA, 22 nt, synthetic construct
  source 1..22: mol_type = other RNA
tatgtcaacagatatggttctg

SEQ ID NO: 104 - RNA, 22 nt, synthetic construct
  source 1..22: mol_type = other RNA
taaaatgtcaacagatatggtt

SEQ ID NO: 105 - RNA, 22 nt, synthetic construct
  source 1..22: mol_type = other RNA
taaggaaatagggacctctgaa

SEQ ID NO: 106 - RNA, 22 nt, synthetic construct
  source 1..22: mol_type = other RNA
ttacaaaggaaatagggacctc

SEQ ID NO: 107 - RNA, 22 nt, synthetic construct
  source 1..22: mol_type = other RNA
tatgtacaaaggaaatagggac

SEQ ID NO: 108 - RNA, 22 nt, synthetic construct
  source 1..22: mol_type = other RNA
ttatgtacaaaggaaataggga

SEQ ID NO: 109 - RNA, 22 nt, synthetic construct
  source 1..22: mol_type = other RNA
ttgtcttttctttctaagtgtg

SEQ ID NO: 110 - RNA, 22 nt, synthetic construct
  source 1..22: mol_type = other RNA
tttcattactctgtgtccacag

SEQ ID NO: 111 - RNA, 22 nt, synthetic construct
  source 1..22: mol_type = other RNA
ttatgctaacatgtactatcac

SEQ ID NO: 112 - RNA, 22 nt, synthetic construct
  source 1..22: mol_type = other RNA
tataaaagggttccaccacgat

SEQ ID NO: 113 - RNA, 22 nt, synthetic construct
  source 1..22: mol_type = other RNA
taataaaagggttccaccacga

SEQ ID NO: 114 - RNA, 22 nt, synthetic construct
  source 1..22: mol_type = other RNA
tttaataaaagggttccaccac

SEQ ID NO: 115 - RNA, 22 nt, synthetic construct
  source 1..22: mol_type = other RNA
tacagttaaatatgggatagta

SEQ ID NO: 116 - RNA, 22 nt, synthetic construct
  source 1..22: mol_type = other RNA
ttagaacagttaaatatgggat

SEQ ID NO: 117 - RNA, 22 nt, synthetic construct
  source 1..22: mol_type = other RNA
tttaataagtggatgagagcat

SEQ ID NO: 118 - RNA, 22 nt, synthetic construct
  source 1..22: mol_type = other RNA
ttcttgtacccgatattgtggc

SEQ ID NO: 119 - RNA, 22 nt, synthetic construct
  source 1..22: mol_type = other RNA
ttatctatctttgtattccctc

SEQ ID NO: 120 - RNA, 22 nt, synthetic construct
  source 1..22: mol_type = other RNA
tttaaaatccctgagggcagga

SEQ ID NO: 121 - RNA, 22 nt, synthetic construct
  source 1..22: mol_type = other RNA
tattttcagacctatcctagaa

SEQ ID NO: 122 - RNA, 22 nt, synthetic construct
  source 1..22: mol_type = other RNA
ttccaaataaagctactttcta

SEQ ID NO: 123 - RNA, 22 nt, synthetic construct
  source 1..22: mol_type = other RNA
ttagattgtctgtaatatccaa

SEQ ID NO: 124 - RNA, 22 nt, synthetic construct
  source 1..22: mol_type = other RNA
ttcttgtttatttgaggcacgt

SEQ ID NO: 125 - RNA, 22 nt, synthetic construct
  source 1..22: mol_type = other RNA
tattcttgtttatttgaggcac

SEQ ID NO: 126 - RNA, 22 nt, synthetic construct
  source 1..22: mol_type = other RNA
tttagacaccctcaaataagct

SEQ ID NO: 127 - RNA, 22 nt, synthetic construct
  source 1..22: mol_type = other RNA
taacatacggatttcttcagag

SEQ ID NO: 128 - RNA, 22 nt, synthetic construct
  source 1..22: mol_type = other RNA
taaaatgtactaacatacggat

SEQ ID NO: 129 - RNA, 22 nt, synthetic construct
  source 1..22: mol_type = other RNA
tacaagaagcctgccttatgct

SEQ ID NO: 130 - RNA, 22 nt, synthetic construct
  source 1..22: mol_type = other RNA
ttaacatttgacagcataagta

SEQ ID NO: 131 - RNA, 22 nt, synthetic construct
  source 1..22: mol_type = other RNA
tagttcatgctgaaatactgac

SEQ ID NO: 132 - RNA, 22 nt, synthetic construct
  source 1..22: mol_type = other RNA
taagcatacaacagaatctgta

SEQ ID NO: 133 - RNA, 22 nt, synthetic construct
  source 1..22: mol_type = other RNA
tagaagaaagcatacaacagaa

SEQ ID NO: 134 - RNA, 22 nt, synthetic construct
  source 1..22: mol_type = other RNA
tatagaagaaagcatacaacag

SEQ ID NO: 135 - RNA, 22 nt, synthetic construct
  source 1..22: mol_type = other RNA
tttcacttaactctcaagtcag

SEQ ID NO: 136 - RNA, 22 nt, synthetic construct
  source 1..22: mol_type = other RNA
taaaatagtgcacgacagtcat

SEQ ID NO: 137 - RNA, 22 nt, synthetic construct
  source 1..22: mol_type = other RNA
ttgaaaagcaagtgctatgcct

SEQ ID NO: 138 - RNA, 22 nt, synthetic construct
  source 1..22: mol_type = other RNA
tacttctaacctaatgaatcta

SEQ ID NO: 139 - RNA, 22 nt, synthetic construct
  source 1..22: mol_type = other RNA
tagactatgccctaacaagcaa

SEQ ID NO: 140 - RNA, 22 nt, synthetic construct
  source 1..22: mol_type = other RNA
taagactatgccctaacaagca

SEQ ID NO: 141 - RNA, 22 nt, synthetic construct
  source 1..22: mol_type = other RNA
ttcaaagactatgccctaacaa

SEQ ID NO: 142 - RNA, 22 nt, synthetic construct
  source 1..22: mol_type = other RNA
tttcaatcaaagactatgccct

SEQ ID NO: 143 - RNA, 22 nt, synthetic construct
  source 1..22: mol_type = other RNA
ttttagaagcagctctcaagat

SEQ ID NO: 144 - RNA, 22 nt, synthetic construct
  source 1..22: mol_type = other RNA
taatgttttgaaaaatgcccat

SEQ ID NO: 145 - RNA, 22 nt, synthetic construct
  source 1..22: mol_type = other RNA
ttataaagcaaggctagatgaa

SEQ ID NO: 146 - RNA, 22 nt, synthetic construct
  source 1..22: mol_type = other RNA
taaatataaagcaaggctagat

SEQ ID NO: 147 - RNA, 22 nt, synthetic construct
  source 1..22: mol_type = other RNA
tatgaaatataaagcaaggcta

SEQ ID NO: 148 - RNA, 22 nt, synthetic construct
  source 1..22: mol_type = other RNA
tatagtgagggaatattaagaa

SEQ ID NO: 149 - RNA, 22 nt, synthetic construct
  source 1..22: mol_type = other RNA
tttctctttcattagaaggcta

SEQ ID NO: 150 - RNA, 22 nt, synthetic construct
  source 1..22: mol_type = other RNA
ttactaagggattctctttcat

SEQ ID NO: 151 - RNA, 22 nt, synthetic construct
  source 1..22: mol_type = other RNA
ttttaatctctgatccttggtt

SEQ ID NO: 152 - RNA, 22 nt, synthetic construct
  source 1..22: mol_type = other RNA
ttatcatcatcattgaatggca

SEQ ID NO: 153 - RNA, 22 nt, synthetic construct
  source 1..22: mol_type = other RNA
tatgaatgccaaagacaaacta

SEQ ID NO: 154 - RNA, 22 nt, synthetic construct
  source 1..22: mol_type = other RNA
taagaagatgaatgccaaagac

SEQ ID NO: 155 - RNA, 22 nt, synthetic construct
  source 1..22: mol_type = other RNA
tactaaaagaagatgaatgcca

SEQ ID NO: 156 - RNA, 22 nt, synthetic construct
  source 1..22: mol_type = other RNA
tacaaatactctatagtgccaa

SEQ ID NO: 157 - RNA, 22 nt, synthetic construct
  source 1..22: mol_type = other RNA
taaagcaaaagtagacattctt

SEQ ID NO: 158 - RNA, 22 nt, synthetic construct
  source 1..22: mol_type = other RNA
tttgttacctaattttgctgta

SEQ ID NO: 159 - RNA, 22 nt, synthetic construct
  source 1..22: mol_type = other RNA
taaaagtatgctggcagttcta

SEQ ID NO: 160 - RNA, 22 nt, synthetic construct
  source 1..22: mol_type = other RNA
taagagaaaagtatgctggcag

SEQ ID NO: 161 - RNA, 22 nt, synthetic construct
  source 1..22: mol_type = other RNA
ttcatctacaactgaaagagaa

SEQ ID NO: 162 - RNA, 22 nt, synthetic construct
  source 1..22: mol_type = other RNA
tattcatctacaactgaaagag

SEQ ID NO: 163 - RNA, 22 nt, synthetic construct
  source 1..22: mol_type = other RNA
ttatgtctgggagccaattgca

SEQ ID NO: 164 - RNA, 22 nt, synthetic construct
  source 1..22: mol_type = other RNA
taaaattatgtctgggagccaa

SEQ ID NO: 165 - RNA, 22 nt, synthetic construct
  source 1..22: mol_type = other RNA
tatataagccaataagatgctt

SEQ ID NO: 166 - RNA, 22 nt, synthetic construct
  source 1..22: mol_type = other RNA
ttgtataagccagaccattctt

SEQ ID NO: 167 - RNA, 22 nt, synthetic construct
  source 1..22: mol_type = other RNA
taagatgtataagccagaccat

SEQ ID NO: 168 - RNA, 22 nt, synthetic construct
  source 1..22: mol_type = other RNA
tatgcatagaatgaaaactgta

SEQ ID NO: 169 - RNA, 22 nt, synthetic construct
  source 1..22: mol_type = other RNA
ttaattagctccatgcatagaa

SEQ ID NO: 170 - RNA, 22 nt, synthetic construct
  source 1..22: mol_type = other RNA
ttcagtaattagctccatgcat

SEQ ID NO: 171 - RNA, 22 nt, synthetic construct
  source 1..22: mol_type = other RNA
taaagtcagtaattagctccat

SEQ ID NO: 172 - RNA, 22 nt, synthetic construct
  source 1..22: mol_type = other RNA
tattatttagcctatggaagaa

SEQ ID NO: 173 - RNA, 22 nt, synthetic construct
  source 1..22: mol_type = other RNA
taatattttggctcagatactc

SEQ ID NO: 174 - RNA, 22 nt, synthetic construct
  source 1..22: mol_type = other RNA
tagtttgaataatcttctccag

SEQ ID NO: 175 - RNA, 22 nt, synthetic construct
  source 1..22: mol_type = other RNA
taaagtcaatccaaaattcctt

SEQ ID NO: 176 - RNA, 22 nt, synthetic construct
  source 1..22: mol_type = other RNA
tagtactttgaaagtcaatcca

SEQ ID NO: 177 - RNA, 22 nt, synthetic construct
  source 1..22: mol_type = other RNA
taggtataagaagagtcacgct

SEQ ID NO: 178 - RNA, 22 nt, synthetic construct
  source 1..22: mol_type = other RNA
ttaggtataagaagagtcacgc

SEQ ID NO: 179 - RNA, 22 nt, synthetic construct
  source 1..22: mol_type = other RNA
tagttcaaggcatgttttgcaa

SEQ ID NO: 180 - RNA, 22 nt, synthetic construct
  source 1..22: mol_type = other RNA
ttttcacagtagttcaagagtt

SEQ ID NO: 181 - RNA, 22 nt, synthetic construct
  source 1..22: mol_type = other RNA
tattcttttcacagtagttcaa

SEQ ID NO: 182 - RNA, 22 nt, synthetic construct
  source 1..22: mol_type = other RNA
ttacaacggtgattcttttcac

SEQ ID NO: 183 - RNA, 22 nt, synthetic construct
  source 1..22: mol_type = other RNA
taaaagtctttacaacggtgat

SEQ ID NO: 184 - RNA, 22 nt, synthetic construct
  source 1..22: mol_type = other RNA
tagagtatcagctagcttacaa

SEQ ID NO: 185 - RNA, 22 nt, synthetic construct
  source 1..22: mol_type = other RNA
tattcctttgggcctgtcggct

SEQ ID NO: 186 - RNA, 22 nt, synthetic construct
  source 1..22: mol_type = other RNA
tacagtttattgcccaattcct

SEQ ID NO: 187 - RNA, 22 nt, synthetic construct
  source 1..22: mol_type = other RNA
tactactaaaatccatctacat

SEQ ID NO: 188 - RNA, 22 nt, synthetic construct
  source 1..22: mol_type = other RNA
tttttggtataaaggctatcac

SEQ ID NO: 189 - RNA, 22 nt, synthetic construct
  source 1..22: mol_type = other RNA
taacattttggtataaaggcta

SEQ ID NO: 190 - RNA, 22 nt, synthetic construct
  source 1..22: mol_type = other RNA
ttatttacatctgaagacagat

SEQ ID NO: 191 - RNA, 22 nt, synthetic construct
  source 1..22: mol_type = other RNA
tcaaaagacatacacacttcag

SEQ ID NO: 192 - RNA, 22 nt, synthetic construct
  source 1..22: mol_type = other RNA
tacaaaagacatacacacttca

SEQ ID NO: 193 - RNA, 22 nt, synthetic construct
  source 1..22: mol_type = other RNA
tcacaaaagacatacacacttc

SEQ ID NO: 194 - RNA, 22 nt, synthetic construct
  source 1..22: mol_type = other RNA
ttcacacaaaagacatacacac

SEQ ID NO: 195 - RNA, 22 nt, synthetic construct
  source 1..22: mol_type = other RNA
tatcacacaaaagacatacaca

SEQ ID NO: 196 - RNA, 22 nt, synthetic construct
  source 1..22: mol_type = other RNA
tgaatcacacaaaagacataca

SEQ ID NO: 197 - RNA, 22 nt, synthetic construct
  source 1..22: mol_type = other RNA
tagaatcacacaaaagacatac

SEQ ID NO: 198 - RNA, 22 nt, synthetic construct
  source 1..22: mol_type = other RNA
taagaatcacacaaaagacata

SEQ ID NO: 199 - RNA, 22 nt, synthetic construct
  source 1..22: mol_type = other RNA
tgaagaatcacacaaaagacat

SEQ ID NO: 200 - RNA, 22 nt, synthetic construct
  source 1..22: mol_type = other RNA
ttgaagaatcacacaaaagaca

SEQ ID NO: 201 - RNA, 22 nt, synthetic construct
  source 1..22: mol_type = other RNA
ttttgaagaatcacacaaaaga

SEQ ID NO: 202 - RNA, 22 nt, synthetic construct
  source 1..22: mol_type = other RNA
tgttttggtaacattgttggaa

SEQ ID NO: 203 - RNA, 22 nt, synthetic construct
  source 1..22: mol_type = other RNA
tcggttttggtaacattgttgg

SEQ ID NO: 204 - RNA, 22 nt, synthetic construct
  source 1..22: mol_type = other RNA
tttcggttttggtaacattgtt

SEQ ID NO: 205 - RNA, 22 nt, synthetic construct
  source 1..22: mol_type = other RNA
tcattcggttttggtaacattg

SEQ ID NO: 206 - RNA, 22 nt, synthetic construct
  source 1..22: mol_type = other RNA
tagcattcggttttggtaacat

SEQ ID NO: 207 - RNA, 22 nt, synthetic construct
  source 1..22: mol_type = other RNA
taagcagcattcggttttggta

SEQ ID NO: 208 - RNA, 22 nt, synthetic construct
  source 1..22: mol_type = other RNA
tgttgcaaaaatctgtgaagca

SEQ ID NO: 209 - RNA, 22 nt, synthetic construct
  source 1..22: mol_type = other RNA
ttgttgcaaaaatctgtgaagc

SEQ ID NO: 210 - RNA, 22 nt, synthetic construct
  source 1..22: mol_type = other RNA
tttgttgcaaaaatctgtgaag

SEQ ID NO: 211 - RNA, 22 nt, synthetic construct
  source 1..22: mol_type = other RNA
tgttgttgcaaaaatctgtgaa

SEQ ID NO: 212 - RNA, 22 nt, synthetic construct
  source 1..22: mol_type = other RNA
ttgttgttgcaaaaatctgtga

SEQ ID NO: 213 - RNA, 22 nt, synthetic construct
  source 1..22: mol_type = other RNA
ttatgttgttgcaaaaatctgt

SEQ ID NO: 214 - RNA, 22 nt, synthetic construct
  source 1..22: mol_type = other RNA
tttatgttgttgcaaaaatctg

SEQ ID NO: 215 - RNA, 22 nt, synthetic construct
  source 1..22: mol_type = other RNA
taccagattgcactcagagagt

SEQ ID NO: 216 - RNA, 22 nt, synthetic construct
  source 1..22: mol_type = other RNA
ttaccagattgcactcagagag

SEQ ID NO: 217 - RNA, 22 nt, synthetic construct
  source 1..22: mol_type = other RNA
tttaccagattgcactcagaga

SEQ ID NO: 218 - RNA, 22 nt, synthetic construct
  source 1..22: mol_type = other RNA
tatttaccagattgcactcaga

SEQ ID NO: 219 - RNA, 22 nt, synthetic construct
  source 1..22: mol_type = other RNA
tcatttaccagattgcactcag

SEQ ID NO: 220 - RNA, 22 nt, synthetic construct
  source 1..22: mol_type = other RNA
tgcatttaccagattgcactca

SEQ ID NO: 221 - RNA, 22 nt, synthetic construct
  source 1..22: mol_type = other RNA
tccagccaaagttgagtccaag

SEQ ID NO: 222 - RNA, 22 nt, synthetic construct
  source 1..22: mol_type = other RNA
ttaccagccaaagttgagtcca

SEQ ID NO: 223 - RNA, 22 nt, synthetic construct
  source 1..22: mol_type = other RNA
tatattcagataccagccaaag

SEQ ID NO: 224 - RNA, 22 nt, synthetic construct
  source 1..22: mol_type = other RNA
tctttgattttatgtctcgatg

SEQ ID NO: 225 - RNA, 22 nt, synthetic construct
  source 1..22: mol_type = other RNA
tttctttgattttatgtctcga

SEQ ID NO: 226 - RNA, 22 nt, synthetic construct
  source 1..22: mol_type = other RNA
ttcacaactttgccactggttt

SEQ ID NO: 227 - RNA, 22 nt, synthetic construct
  source 1..22: mol_type = other RNA
tgtcttcttaatacgaagagca

SEQ ID NO: 228 - RNA, 22 nt, synthetic construct
  source 1..22: mol_type = other RNA
tagtcttcttaatacgaagagc

SEQ ID NO: 229 - RNA, 22 nt, synthetic construct
  source 1..22: mol_type = other RNA
tatagtcttcttaatacgaaga

SEQ ID NO: 230 - RNA, 22 nt, synthetic construct
  source 1..22: mol_type = other RNA
ttatagtcttcttaatacgaag

SEQ ID NO: 231 - RNA, 22 nt, synthetic construct
  source 1..22: mol_type = other RNA
ttgagatatagtcttcttaata

SEQ ID NO: 232 - RNA, 22 nt, synthetic construct
  source 1..22: mol_type = other RNA
tttgagatatagtcttcttaat

SEQ ID NO: 233 - RNA, 22 nt, synthetic construct
  source 1..22: mol_type = other RNA
tgttgagatatagtcttcttaa

SEQ ID NO: 234 - RNA, 22 nt, synthetic construct
  source 1..22: mol_type = other RNA
tagttgagatatagtcttctta

SEQ ID NO: 235 - RNA, 22 nt, synthetic construct
  source 1..22: mol_type = other RNA
taaagttgagatatagtcttct

SEQ ID NO: 236 - RNA, 22 nt, synthetic construct
  source 1..22: mol_type = other RNA
tcaaagttgagatatagtcttc

SEQ ID NO: 237 - RNA, 22 nt, synthetic construct
  source 1..22: mol_type = other RNA
tcacaaagttgagatatagtct

SEQ ID NO: 238 - RNA, 22 nt, synthetic construct
  source 1..22: mol_type = other RNA
tgacacaaagttgagatatagt

SEQ ID NO: 239 - RNA, 22 nt, synthetic construct
  source 1..22: mol_type = other RNA
tcagtcttctttgacacaaagt

SEQ ID NO: 240 - RNA, 22 nt, synthetic construct
  source 1..22: mol_type = other RNA
tgcagtcttctttgacacaaag

SEQ ID NO: 241 - RNA, 22 nt, synthetic construct
  source 1..22: mol_type = other RNA
tttgcagtcttctttgacacaa

SEQ ID NO: 242 - RNA, 22 nt, synthetic construct
  source 1..22: mol_type = other RNA
ttttgcagtcttctttgacaca

SEQ ID NO: 243 - RNA, 22 nt, synthetic construct
  source 1..22: mol_type = other RNA
tattaggctttgcagtcttctt

SEQ ID NO: 244 - RNA, 22 nt, synthetic construct
  source 1..22: mol_type = other RNA
tcattaggctttgcagtcttct

SEQ ID NO: 245 - RNA, 22 nt, synthetic construct
  source 1..22: mol_type = other RNA
ttcattaggctttgcagtcttc

SEQ ID NO: 246 - RNA, 22 nt, synthetic construct
  source 1..22: mol_type = other RNA
tcatcattaggctttgcagtct

SEQ ID NO: 247 - RNA, 22 nt, synthetic construct
  source 1..22: mol_type = other RNA
ttcatcattaggctttgcagtc

SEQ ID NO: 248 - RNA, 22 nt, synthetic construct
  source 1..22: mol_type = other RNA
tatcatcattaggctttgcagt

SEQ ID NO: 249 - RNA, 22 nt, synthetic construct
  source 1..22: mol_type = other RNA
tttaaaaagtcctgctaactta

SEQ ID NO: 250 - RNA, 22 nt, synthetic construct
  source 1..22: mol_type = other RNA
tgtacaaaggaaatagggacct

SEQ ID NO: 251 - RNA, 22 nt, synthetic construct
  source 1..22: mol_type = other RNA
ttgtacaaaggaaatagggacc

SEQ ID NO: 252 - RNA, 22 nt, synthetic construct
  source 1..22: mol_type = other RNA
tatgtacaaaggaaatagggac

SEQ ID NO: 253 - RNA, 22 nt, synthetic construct
  source 1..22: mol_type = other RNA
tagttaaatatgggatagtaaa

SEQ ID NO: 254 - RNA, 22 nt, synthetic construct
  source 1..22: mol_type = other RNA
tcagttaaatatgggatagtaa

SEQ ID NO: 255 - RNA, 22 nt, synthetic construct
  source 1..22: mol_type = other RNA
taacagttaaatatgggatagt

SEQ ID NO: 256 - RNA, 22 nt, synthetic construct
  source 1..22: mol_type = other RNA
tgaacagttaaatatgggatag

SEQ ID NO: 257 - RNA, 22 nt, synthetic construct
  source 1..22: mol_type = other RNA
tccaaataaagctactttctaa

SEQ ID NO: 258 - RNA, 22 nt, synthetic construct
  source 1..22: mol_type = other RNA
tatccaaataaagctactttct

SEQ ID NO: 259 - RNA, 22 nt, synthetic construct
  source 1..22: mol_type = other RNA
ttatccaaataaagctactttc

SEQ ID NO: 260 - RNA, 22 nt, synthetic construct
  source 1..22: mol_type = other RNA
tatatccaaataaagctacttt

SEQ ID NO: 261 - RNA, 22 nt, synthetic construct
  source 1..22: mol_type = other RNA
tacatacggatttcttcagagt

SEQ ID NO: 262 - RNA, 22 nt, synthetic construct
  source 1..22: mol_type = other RNA
ttaacatacggatttcttcaga

SEQ ID NO: 263 - RNA, 22 nt, synthetic construct
  source 1..22: mol_type = other RNA
tcatttgacagcataagtatat

SEQ ID NO: 264 - RNA, 22 nt, synthetic construct
  source 1..22: mol_type = other RNA
tacatttgacagcataagtata

SEQ ID NO: 265 - RNA, 22 nt, synthetic construct
  source 1..22: mol_type = other RNA
taacatttgacagcataagtat

SEQ ID NO: 266 - RNA, 22 nt, synthetic construct
  source 1..22: mol_type = other RNA
tataacatttgacagcataagt

SEQ ID NO: 267 - RNA, 22 nt, synthetic construct
  source 1..22: mol_type = other RNA
ttataacatttgacagcataag

SEQ ID NO: 268 - RNA, 22 nt, synthetic construct
  source 1..22: mol_type = other RNA
tgaagaaagcatacaacagaat

SEQ ID NO: 269 - RNA, 22 nt, synthetic construct
  source 1..22: mol_type = other RNA
ttagaagaaagcatacaacaga

SEQ ID NO: 270 - RNA, 22 nt, synthetic construct
  source 1..22: mol_type = other RNA
  modified_base 1: mod_base = OTHER; note = 2'-O-methyl-uridine with phosphorothioate linkage
  modified_base 2: mod_base = OTHER; note = 2'-fluoro-uridine with phosphorothioate linkage
  modified_base 3: mod_base = OTHER; note = 2'-fluoro-uridine
  modified_base 4: mod_base = OTHER; note = 2'-O-methyl-uridine
  modified_base 5: mod_base = OTHER; note = 2'-fluoro-uridine
  modified_base 6: mod_base = OTHER; note = 2'-O-methyl-cytidine
  modified_base 7: mod_base = OTHER; note = 2'-fluoro-adenosine
  modified_base 8: mod_base = OTHER; note = 2'-O-methyl-cytidine
  modified_base 9: mod_base = OTHER; note = 2'-O-methyl-adenosine
  modified_base 10: mod_base = OTHER; note = 2'-fluoro-guanosine
  modified_base 11: mod_base = OTHER; note = 2'-O-methyl-cytidine
  modified_base 12: mod_base = OTHER; note = 2'-O-methyl-cytidine
  modified_base 13: mod_base = OTHER; note = 2'-O-methyl-adenosine
  modified_base 14: mod_base = OTHER; note = 2'-fluoro-cytidine
  modified_base 15: mod_base = OTHER; note = 2'-O-methyl-adenosine
  modified_base 16: mod_base = OTHER; note = 2'-fluoro-uridine
  modified_base 17: mod_base = OTHER; note = 2'-O-methyl-cytidine
  modified_base 18: mod_base = OTHER; note = 2'-O-methyl-uridine
  modified_base 19: mod_base = OTHER; note = 2'-O-methyl-uridine
  modified_base 20: mod_base = OTHER; note = 2'-O-methyl-cytidine with phosphorothioate linkage
  modified_base 21: mod_base = OTHER; note = 2'-O-methyl-cytidine with phosphorothioate linkage
  modified_base 22: mod_base = OTHER; note = 2'-O-methyl-cytidine
tttttcacagccacatcttccc

SEQ ID NO: 271 - RNA, 22 nt, synthetic construct
  source 1..22: mol_type = other RNA
  modified_base 1: mod_base = OTHER; note = 2'-O-methyl-uridine with phosphorothioate linkage
  modified_base 2: mod_base = OTHER; note = 2'-fluoro-uridine with phosphorothioate linkage
  modified_base 3: mod_base = OTHER; note = 2'-fluoro-guanosine
  modified_base 4: mod_base = OTHER; note = 2'-O-methyl-cytidine
  modified_base 5: mod_base = OTHER; note = 2'-fluoro-adenosine
  modified_base 6: mod_base = OTHER; note = 2'-O-methyl-guanosine
  modified_base 7: mod_base = OTHER; note = 2'-fluoro-uridine
  modified_base 8: mod_base = OTHER; note = 2'-O-methyl-cytidine
  modified_base 9: mod_base = OTHER; note = 2'-O-methyl-uridine
  modified_base 10: mod_base = OTHER; note = 2'-fluoro-uridine
  modified_base 11: mod_base = OTHER; note = 2'-O-methyl-cytidine
  modified_base 12: mod_base = OTHER; note = 2'-O-methyl-uridine
  modified_base 13: mod_base = OTHER; note = 2'-O-methyl-uridine
  modified_base 14: mod_base = OTHER; note = 2'-fluoro-uridine
  modified_base 15: mod_base = OTHER; note = 2'-O-methyl-guanosine
  modified_base 16: mod_base = OTHER; note = 2'-fluoro-adenosine
  modified_base 17: mod_base = OTHER; note = 2'-O-methyl-cytidine
  modified_base 18: mod_base = OTHER; note = 2'-O-methyl-adenosine
  modified_base 19: mod_base = OTHER; note = 2'-O-methyl-cytidine
  modified_base 20: mod_base = OTHER; note = 2'-O-methyl-adenosine with phosphorothioate linkage
  modified_base 21: mod_base = OTHER; note = 2'-O-methyl-adenosine with phosphorothioate linkage
  modified_base 22: mod_base = OTHER; note = 2'-O-methyl-adenosine
ttgcagtcttctttgacacaaa

SEQ ID NO: 272 - RNA, 22 nt, synthetic construct
  source 1..22: mol_type = other RNA
  modified_base 1: mod_base = OTHER; note = 2'-O-methyl-uridine with phosphorothioate linkage
  modified_base 2: mod_base = OTHER; note = 2'-fluoro-cytidine with phosphorothioate linkage
  modified_base 3: mod_base = OTHER; note = 2'-fluoro-adenosine
  modified_base 4: mod_base = OTHER; note = 2'-O-methyl-guanosine
  modified_base 5: mod_base = OTHER; note = 2'-fluoro-adenosine
  modified_base 6: mod_base = OTHER; note = 2'-O-methyl-adenosine
  modified_base 7: mod_base = OTHER; note = 2'-fluoro-guanosine
  modified_base 8: mod_base = OTHER; note = 2'-O-methyl-adenosine
  modified_base 9: mod_base = OTHER; note = 2'-O-methyl-cytidine
  modified_base 10: mod_base = OTHER; note = 2'-fluoro-uridine
  modified_base 11: mod_base = OTHER; note = 2'-O-methyl-uridine
  modified_base 12: mod_base = OTHER; note = 2'-O-methyl-guanosine
  modified_base 13: mod_base = OTHER; note = 2'-O-methyl-adenosine
  modified_base 14: mod_base = OTHER; note = 2'-fluoro-guanosine
  modified_base 15: mod_base = OTHER; note = 2'-O-methyl-cytidine
  modified_base 16: mod_base = OTHER; note = 2'-fluoro-adenosine
  modified_base 17: mod_base = OTHER; note = 2'-O-methyl-uridine
  modified_base 18: mod_base = OTHER; note = 2'-O-methyl-uridine
  modified_base 19: mod_base = OTHER; note = 2'-O-methyl-cytidine
  modified_base 20: mod_base = OTHER; note = 2'-O-methyl-adenosine with phosphorothioate linkage
  modified_base 21: mod_base = OTHER; note = 2'-O-methyl-guanosine with phosphorothioate linkage
  modified_base 22: mod_base = OTHER; note = 2'-O-methyl-uridine
tcagaagacttgagcattcagt

SEQ ID NO: 273 - RNA, 22 nt, synthetic construct
  source 1..22: mol_type = other RNA
  modified_base 1: mod_base = OTHER; note = 2'-O-methyl-uridine with phosphorothioate linkage
  modified_base 2: mod_base = OTHER; note = 2'-fluoro-adenosine with phosphorothioate linkage
  modified_base 3: mod_base = OTHER; note = 2'-fluoro-cytidine
  modified_base 4: mod_base = OTHER; note = 2'-O-methyl-adenosine
  modified_base 5: mod_base = OTHER; note = 2'-fluoro-guanosine
  modified_base 6: mod_base = OTHER; note = 2'-O-methyl-adenosine
  modified_base 7: mod_base = OTHER; note = 2'-fluoro-adenosine
  modified_base 8: mod_base = OTHER; note = 2'-O-methyl-guanosine
  modified_base 9: mod_base = OTHER; note = 2'-O-methyl-adenosine
  modified_base 10: mod_base = OTHER; note = 2'-fluoro-cytidine
  modified_base 11: mod_base = OTHER; note = 2'-O-methyl-uridine
  modified_base 12: mod_base = OTHER; note = 2'-O-methyl-uridine
  modified_base 13: mod_base = OTHER; note = 2'-O-methyl-guanosine
  modified_base 14: mod_base = OTHER; note = 2'-fluoro-adenosine
  modified_base 15: mod_base = OTHER; note = 2'-O-methyl-guanosine
  modified_base 16: mod_base = OTHER; note = 2'-fluoro-cytidine
  modified_base 17: mod_base = OTHER; note = 2'-O-methyl-adenosine
  modified_base 18: mod_base = OTHER; note = 2'-O-methyl-uridine
  modified_base 19: mod_base = OTHER; note = 2'-O-methyl-uridine
  modified_base 20: mod_base = OTHER; note = 2'-O-methyl-cytidine with phosphorothioate linkage
  modified_base 21: mod_base = OTHER; note = 2'-O-methyl-adenosine with phosphorothioate linkage
  modified_base 22: mod_base = OTHER; note = 2'-O-methyl-guanosine
tacagaagacttgagcattcag

SEQ ID NO: 274 - RNA, 22 nt, synthetic construct
  source 1..22: mol_type = other RNA
  modified_base 1: mod_base = OTHER; note = 2'-O-methyl-uridine with phosphorothioate linkage
  modified_base 2: mod_base = OTHER; note = 2'-fluoro-guanosine with phosphorothioate linkage
  modified_base 3: mod_base = OTHER; note = 2'-fluoro-adenosine
  modified_base 4: mod_base = OTHER; note = 2'-O-methyl-cytidine
  modified_base 5: mod_base = OTHER; note = 2'-fluoro-adenosine
  modified_base 6: mod_base = OTHER; note = 2'-O-methyl-guanosine
  modified_base 7: mod_base = OTHER; note = 2'-fluoro-adenosine
  modified_base 8: mod_base = OTHER; note = 2'-O-methyl-adenosine
  modified_base 9: mod_base = OTHER; note = 2'-O-methyl-guanosine
  modified_base 10: mod_base = OTHER; note = 2'-fluoro-adenosine
  modified_base 11: mod_base = OTHER; note = 2'-O-methyl-cytidine
  modified_base 12: mod_base = OTHER; note = 2'-O-methyl-uridine
  modified_base 13: mod_base = OTHER; note = 2'-O-methyl-uridine
  modified_base 14: mod_base = OTHER; note = 2'-fluoro-guanosine
  modified_base 15: mod_base = OTHER; note = 2'-O-methyl-adenosine
  modified_base 16: mod_base = OTHER; note = 2'-fluoro-guanosine
  modified_base 17: mod_base = OTHER; note = 2'-O-methyl-cytidine
  modified_base 18: mod_base = OTHER; note = 2'-O-methyl-adenosine
  modified_base 19: mod_base = OTHER; note = 2'-O-methyl-uridine
  modified_base 20: mod_base = OTHER; note = 2'-O-methyl-uridine with phosphorothioate linkage
  modified_base 21: mod_base = OTHER; note = 2'-O-methyl-cytidine with phosphorothioate linkage
  modified_base 22: mod_base = OTHER; note = 2'-O-methyl-adenosine
tgacagaagacttgagcattca

SEQ ID NO: 275 - RNA, 22 nt, synthetic construct
  source 1..22: mol_type = other RNA
  modified_base 1: mod_base = OTHER; note = 2'-O-methyl-uridine with phosphorothioate linkage
  modified_base 2: mod_base = OTHER; note = 2'-fluoro-uridine with phosphorothioate linkage
  modified_base 3: mod_base = OTHER; note = 2'-fluoro-guanosine
  modified_base 4: mod_base = OTHER; note = 2'-O-methyl-adenosine
  modified_base 5: mod_base = OTHER; note = 2'-fluoro-cytidine
  modified_base 6: mod_base = OTHER; note = 2'-O-methyl-adenosine
  modified_base 7: mod_base = OTHER; note = 2'-fluoro-guanosine
  modified_base 8: mod_base = OTHER; note = 2'-O-methyl-adenosine
  modified_base 9: mod_base = OTHER; note = 2'-O-methyl-adenosine
  modified_base 10: mod_base = OTHER; note = 2'-fluoro-guanosine
  modified_base 11: mod_base = OTHER; note = 2'-O-methyl-adenosine
  modified_base 12: mod_base = OTHER; note = 2'-O-methyl-cytidine
  modified_base 13: mod_base = OTHER; note = 2'-O-methyl-uridine
  modified_base 14: mod_base = OTHER; note = 2'-fluoro-uridine
  modified_base 15: mod_base = OTHER; note = 2'-O-methyl-guanosine
  modified_base 16: mod_base = OTHER; note = 2'-fluoro-adenosine
  modified_base 17: mod_base = OTHER; note = 2'-O-methyl-guanosine
  modified_base 18: mod_base = OTHER; note = 2'-O-methyl-cytidine
  modified_base 19: mod_base = OTHER; note = 2'-O-methyl-adenosine
  modified_base 20: mod_base = OTHER; note = 2'-O-methyl-uridine with phosphorothioate linkage
  modified_base 21: mod_base = OTHER; note = 2'-O-methyl-uridine with phosphorothioate linkage
  modified_base 22: mod_base = OTHER; note = 2'-O-methyl-cytidine
ttgacagaagacttgagcattc

SEQ ID NO: 276 - RNA, 22 nt, synthetic construct
  source 1..22: mol_type = other RNA
  modified_base 1: mod_base = OTHER; note = 2'-O-methyl-uridine with phosphorothioate linkage
  modified_base 2: mod_base = OTHER; note = 2'-fluoro-adenosine with phosphorothioate linkage
  modified_base 3: mod_base = OTHER; note = 2'-fluoro-uridine
  modified_base 4: mod_base = OTHER; note = 2'-O-methyl-guanosine
  modified_base 5: mod_base = OTHER; note = 2'-fluoro-adenosine
  modified_base 6: mod_base = OTHER; note = 2'-O-methyl-cytidine
  modified_base 7: mod_base = OTHER; note = 2'-fluoro-adenosine
  modified_base 8: mod_base = OTHER; note = 2'-O-methyl-guanosine
  modified_base 9: mod_base = OTHER; note = 2'-O-methyl-adenosine
  modified_base 10: mod_base = OTHER; note = 2'-fluoro-adenosine
  modified_base 11: mod_base = OTHER; note = 2'-O-methyl-guanosine
  modified_base 12: mod_base = OTHER; note = 2'-O-methyl-adenosine
  modified_base 13: mod_base = OTHER; note = 2'-O-methyl-cytidine
  modified_base 14: mod_base = OTHER; note = 2'-fluoro-uridine
  modified_base 15: mod_base = OTHER; note = 2'-O-methyl-uridine
  modified_base 16: mod_base = OTHER; note = 2'-fluoro-guanosine
  modified_base 17: mod_base = OTHER; note = 2'-O-methyl-adenosine
  modified_base 18: mod_base = OTHER; note = 2'-O-methyl-guanosine
  modified_base 19: mod_base = OTHER; note = 2'-O-methyl-cytidine
  modified_base 20: mod_base = OTHER; note = 2'-O-methyl-adenosine with phosphorothioate linkage
  modified_base 21: mod_base = OTHER; note = 2'-O-methyl-uridine with phosphorothioate linkage
  modified_base 22: mod_base = OTHER; note = 2'-O-methyl-uridine
tatgacagaagacttgagcatt

SEQ ID NO: 277 - RNA, 22 nt, synthetic construct
  source 1..22: mol_type = other RNA
  modified_base 1: mod_base = OTHER; note = 2'-O-methyl-uridine with phosphorothioate linkage
  modified_base 2: mod_base = OTHER; note = 2'-fluoro-uridine with phosphorothioate linkage
  modified_base 3: mod_base = OTHER; note = 2'-fluoro-adenosine
  modified_base 4: mod_base = OTHER; note = 2'-O-methyl-uridine
  modified_base 5: mod_base = OTHER; note = 2'-fluoro-guanosine
  modified_base 6: mod_base = OTHER; note = 2'-O-methyl-adenosine
  modified_base 7: mod_base = OTHER; note = 2'-fluoro-cytidine
  modified_base 8: mod_base = OTHER; note = 2'-O-methyl-adenosine
  modified_base 9: mod_base = OTHER; note = 2'-O-methyl-guanosine
  modified_base 10: mod_base = OTHER; note = 2'-fluoro-adenosine
  modified_base 11: mod_base = OTHER; note = 2'-O-methyl-adenosine
  modified_base 12: mod_base = OTHER; note = 2'-O-methyl-guanosine
  modified_base 13: mod_base = OTHER; note = 2'-O-methyl-adenosine
  modified_base 14: mod_base = OTHER; note = 2'-fluoro-cytidine
  modified_base 15: mod_base = OTHER; note = 2'-O-methyl-uridine
  modified_base 16: mod_base = OTHER; note = 2'-fluoro-uridine
  modified_base 17: mod_base = OTHER; note = 2'-O-methyl-guanosine
  modified_base 18: mod_base = OTHER; note = 2'-O-methyl-adenosine
  modified_base 19: mod_base = OTHER; note = 2'-O-methyl-guanosine
  modified_base 20: mod_base = OTHER; note = 2'-O-methyl-cytidine with phosphorothioate linkage
  modified_base 21: mod_base = OTHER; note = 2'-O-methyl-adenosine with phosphorothioate linkage
  modified_base 22: mod_base = OTHER; note = 2'-O-methyl-uridine
ttatgacagaagacttgagcat

SEQ ID NO: 278 - RNA, 22 nt, synthetic construct
  source 1..22: mol_type = other RNA
  modified_base 1: mod_base = OTHER; note = 2'-O-methyl-uridine with phosphorothioate linkage
  modified_base 2: mod_base = OTHER; note = 2'-fluoro-cytidine with phosphorothioate linkage
  modified_base 3: mod_base = OTHER; note = 2'-fluoro-uridine
  modified_base 4: mod_base = OTHER; note = 2'-O-methyl-adenosine
  modified_base 5: mod_base = OTHER; note = 2'-fluoro-uridine
  modified_base 6: mod_base = OTHER; note = 2'-O-methyl-guanosine
  modified_base 7: mod_base = OTHER; note = 2'-fluoro-adenosine
  modified_base 8: mod_base = OTHER; note = 2'-O-methyl-cytidine
  modified_base 9: mod_base = OTHER; note = 2'-O-methyl-adenosine
  modified_base 10: mod_base = OTHER; note = 2'-fluoro-guanosine
  modified_base 11: mod_base = OTHER; note = 2'-O-methyl-adenosine
  modified_base 12: mod_base = OTHER; note = 2'-O-methyl-adenosine
  modified_base 13: mod_base = OTHER; note = 2'-O-methyl-guanosine
  modified_base 14: mod_base = OTHER; note = 2'-fluoro-adenosine
  modified_base 15: mod_base = OTHER; note = 2'-O-methyl-cytidine
  modified_base 16: mod_base = OTHER; note = 2'-fluoro-uridine
  modified_base 17: mod_base = OTHER; note = 2'-O-methyl-uridine
  modified_base 18: mod_base = OTHER; note = 2'-O-methyl-guanosine
  modified_base 19: mod_base = OTHER; note = 2'-O-methyl-adenosine
  modified_base 20: mod_base = OTHER; note = 2'-O-methyl-guanosine with phosphorothioate linkage
  modified_base 21: mod_base = OTHER; note = 2'-O-methyl-cytidine with phosphorothioate linkage
  modified_base 22: mod_base = OTHER; note = 2'-O-methyl-adenosine
tctatgacagaagacttgagca

SEQ ID NO: 279 - RNA, 22 nt, synthetic construct
  source 1..22: mol_type = other RNA
  modified_base 1: mod_base = OTHER; note = 2'-O-methyl-uridine with phosphorothioate linkage
  modified_base 2: mod_base = OTHER; note = 2'-fluoro-adenosine with phosphorothioate linkage
  modified_base 3: mod_base = OTHER; note = 2'-fluoro-cytidine
  modified_base 4: mod_base = OTHER; note = 2'-O-methyl-uridine
  modified_base 5: mod_base = OTHER; note = 2'-fluoro-adenosine
  modified_base 6: mod_base = OTHER; note = 2'-O-methyl-uridine
  modified_base 7: mod_base = OTHER; note = 2'-fluoro-guanosine
  modified_base 8: mod_base = OTHER; note = 2'-O-methyl-adenosine
  modified_base 9: mod_base = OTHER; note = 2'-O-methyl-cytidine
  modified_base 10: mod_base = OTHER; note = 2'-fluoro-adenosine
  modified_base 11: mod_base = OTHER; note = 2'-O-methyl-guanosine
  modified_base 12: mod_base = OTHER; note = 2'-O-methyl-adenosine
  modified_base 13: mod_base = OTHER; note = 2'-O-methyl-adenosine
  modified_base 14: mod_base = OTHER; note = 2'-fluoro-guanosine
  modified_base 15: mod_base = OTHER; note = 2'-O-methyl-adenosine
  modified_base 16: mod_base = OTHER; note = 2'-fluoro-cytidine
  modified_base 17: mod_base = OTHER; note = 2'-O-methyl-uridine
  modified_base 18: mod_base = OTHER; note = 2'-O-methyl-uridine
  modified_base 19: mod_base = OTHER; note = 2'-O-methyl-guanosine
  modified_base 20: mod_base = OTHER; note = 2'-O-methyl-adenosine with phosphorothioate linkage
  modified_base 21: mod_base = OTHER; note = 2'-O-methyl-guanosine with phosphorothioate linkage
  modified_base 22: mod_base = OTHER; note = 2'-O-methyl-cytidine
tactatgacagaagacttgagc

SEQ ID NO: 280 - RNA, 22 nt, synthetic construct
  source 1..22: mol_type = other RNA
  modified_base 1: mod_base = OTHER; note = 2'-O-methyl-uridine with phosphorothioate linkage
  modified_base 2: mod_base = OTHER; note = 2'-fluoro-adenosine with phosphorothioate linkage
  modified_base 3: mod_base = OTHER; note = 2'-fluoro-adenosine
  modified_base 4: mod_base = OTHER; note = 2'-O-methyl-cytidine
  modified_base 5: mod_base = OTHER; note = 2'-fluoro-uridine
  modified_base 6: mod_base = OTHER; note = 2'-O-methyl-adenosine
  modified_base 7: mod_base = OTHER; note = 2'-fluoro-uridine
  modified_base 8: mod_base = OTHER; note = 2'-O-methyl-guanosine
  modified_base 9: mod_base = OTHER; note = 2'-O-methyl-adenosine
  modified_base 10: mod_base = OTHER; note = 2'-fluoro-cytidine
  modified_base 11: mod_base = OTHER; note = 2'-O-methyl-adenosine
  modified_base 12: mod_base = OTHER; note = 2'-O-methyl-guanosine
  modified_base 13: mod_base = OTHER; note = 2'-O-methyl-adenosine
  modified_base 14: mod_base = OTHER; note = 2'-fluoro-adenosine
  modified_base 15: mod_base = OTHER; note = 2'-O-methyl-guanosine
  modified_base 16: mod_base = OTHER; note = 2'-fluoro-adenosine
  modified_base 17: mod_base = OTHER; note = 2'-O-methyl-cytidine
  modified_base 18: mod_base = OTHER; note = 2'-O-methyl-uridine
  modified_base 19: mod_base = OTHER; note = 2'-O-methyl-uridine
  modified_base 20: mod_base = OTHER; note = 2'-O-methyl-guanosine with phosphorothioate linkage
  modified_base 21: mod_base = OTHER; note = 2'-O-methyl-adenosine with phosphorothioate linkage
  modified_base 22: mod_base = OTHER; note = 2'-O-methyl-guanosine
taactatgacagaagacttgag

SEQ ID NO: 281 - RNA, 22 nt, synthetic construct
  source 1..22: mol_type = other RNA
  modified_base 1: mod_base = OTHER; note = 2'-O-methyl-uridine with phosphorothioate linkage
  modified_base 2: mod_base = OTHER; note = 2'-fluoro-uridine with phosphorothioate linkage
  modified_base 3: mod_base = OTHER; note = 2'-fluoro-adenosine
  modified_base 4: mod_base = OTHER; note = 2'-O-methyl-adenosine
  modified_base 5: mod_base = OTHER; note = 2'-fluoro-cytidine
  modified_base 6: mod_base = OTHER; note = 2'-O-methyl-adenosine
  modified_base 7: mod_base = OTHER; note = 2'-fluoro-uridine
  modified_base 8: mod_base = OTHER; note = 2'-O-methyl-uridine
  modified_base 9: mod_base = OTHER; note = 2'-O-methyl-guanosine
  modified_base 10: mod_base = OTHER; note = 2'-fluoro-uridine
  modified_base 11: mod_base = OTHER; note = 2'-O-methyl-uridine
  modified_base 12: mod_base = OTHER; note = 2'-O-methyl-guanosine
  modified_base 13: mod_base = OTHER; note = 2'-O-methyl-guanosine
  modified_base 14: mod_base = OTHER; note = 2'-fluoro-adenosine
  modified_base 15: mod_base = OTHER; note = 2'-O-methyl-adenosine
  modified_base 16: mod_base = OTHER; note = 2'-fluoro-cytidine
  modified_base 17: mod_base = OTHER; note = 2'-O-methyl-uridine
  modified_base 18: mod_base = OTHER; note = 2'-O-methyl-adenosine
  modified_base 19: mod_base = OTHER; note = 2'-O-methyl-uridine
  modified_base 20: mod_base = OTHER; note = 2'-O-methyl-guanosine with phosphorothioate linkage
  modified_base 21: mod_base = OTHER; note = 2'-O-methyl-adenosine with phosphorothioate linkage
  modified_base 22: mod_base = OTHER; note = 2'-O-methyl-cytidine
ttaacattgttggaactatgac

SEQ ID NO: 282 - RNA, 22 nt, synthetic construct
  source 1..22: mol_type = other RNA
  modified_base 1: mod_base = OTHER; note = 2'-O-methyl-uridine with phosphorothioate linkage
  modified_base 2: mod_base = OTHER; note = 2'-fluoro-guanosine with phosphorothioate linkage
  modified_base 3: mod_base = OTHER; note = 2'-fluoro-uridine
  modified_base 4: mod_base = OTHER; note = 2'-O-methyl-adenosine
  modified_base 5: mod_base = OTHER; note = 2'-fluoro-adenosine
  modified_base 6: mod_base = OTHER; note = 2'-O-methyl-cytidine
  modified_base 7: mod_base = OTHER; note = 2'-fluoro-adenosine
  modified_base 8: mod_base = OTHER; note = 2'-O-methyl-uridine
  modified_base 9: mod_base = OTHER; note = 2'-O-methyl-uridine
  modified_base 10: mod_base = OTHER; note = 2'-fluoro-guanosine
  modified_base 11: mod_base = OTHER; note = 2'-O-methyl-uridine
  modified_base 12: mod_base = OTHER; note = 2'-O-methyl-uridine
  modified_base 13: mod_base = OTHER; note = 2'-O-methyl-guanosine
  modified_base 14: mod_base = OTHER; note = 2'-fluoro-guanosine
  modified_base 15: mod_base = OTHER; note = 2'-O-methyl-adenosine
  modified_base 16: mod_base = OTHER; note = 2'-fluoro-adenosine
  modified_base 17: mod_base = OTHER; note = 2'-O-methyl-cytidine
  modified_base 18: mod_base = OTHER; note = 2'-O-methyl-uridine
  modified_base 19: mod_base = OTHER; note = 2'-O-methyl-adenosine
  modified_base 20: mod_base = OTHER; note = 2'-O-methyl-uridine with phosphorothioate linkage
  modified_base 21: mod_base = OTHER; note = 2'-O-methyl-guanosine with phosphorothioate linkage
  modified_base 22: mod_base = OTHER; note = 2'-O-methyl-adenosine
tgtaacattgttggaactatga

SEQ ID NO: 283 - RNA, 22 nt, synthetic construct
  source 1..22: mol_type = other RNA
  modified_base 1: mod_base = OTHER; note = 2'-O-methyl-uridine with phosphorothioate linkage
  modified_base 2: mod_base = OTHER; note = 2'-fluoro-guanosine with phosphorothioate linkage
  modified_base 3: mod_base = OTHER; note = 2'-fluoro-guanosine
  modified_base 4: mod_base = OTHER; note = 2'-O-methyl-uridine
  modified_base 5: mod_base = OTHER; note = 2'-fluoro-adenosine
  modified_base 6: mod_base = OTHER; note = 2'-O-methyl-adenosine
  modified_base 7: mod_base = OTHER; note = 2'-fluoro-cytidine
  modified_base 8: mod_base = OTHER; note = 2'-O-methyl-adenosine
  modified_base 9: mod_base = OTHER; note = 2'-O-methyl-uridine
  modified_base 10: mod_base = OTHER; note = 2'-fluoro-uridine
  modified_base 11: mod_base = OTHER; note = 2'-O-methyl-guanosine
  modified_base 12: mod_base = OTHER; note = 2'-O-methyl-uridine
  modified_base 13: mod_base = OTHER; note = 2'-O-methyl-uridine
  modified_base 14: mod_base = OTHER; note = 2'-fluoro-guanosine
  modified_base 15: mod_base = OTHER; note = 2'-O-methyl-guanosine
  modified_base 16: mod_base = OTHER; note = 2'-fluoro-adenosine
  modified_base 17: mod_base = OTHER; note = 2'-O-methyl-adenosine
  modified_base 18: mod_base = OTHER; note = 2'-O-methyl-cytidine
  modified_base 19: mod_base = OTHER; note = 2'-O-methyl-uridine
  modified_base 20: mod_base = OTHER; note = 2'-O-methyl-adenosine with phosphorothioate linkage
  modified_base 21: mod_base = OTHER; note = 2'-O-methyl-uridine with phosphorothioate linkage
  modified_base 22: mod_base = OTHER; note = 2'-O-methyl-guanosine
tggtaacattgttggaactatg

SEQ ID NO: 284 - RNA, 22 nt, synthetic construct
  source 1..22: mol_type = other RNA
  modified_base 1: mod_base = OTHER; note = 2'-O-methyl-uridine with phosphorothioate linkage
  modified_base 2: mod_base = OTHER; note = 2'-fluoro-uridine with phosphorothioate linkage
  modified_base 3: mod_base = OTHER; note = 2'-fluoro-guanosine
  modified_base 4: mod_base = OTHER; note = 2'-O-methyl-guanosine
  modified_base 5: mod_base = OTHER; note = 2'-fluoro-uridine
  modified_base 6: mod_base = OTHER; note = 2'-O-methyl-adenosine
  modified_base 7: mod_base = OTHER; note = 2'-fluoro-adenosine
  modified_base 8: mod_base = OTHER; note = 2'-O-methyl-cytidine
  modified_base 9: mod_base = OTHER; note = 2'-O-methyl-adenosine
  modified_base 10: mod_base = OTHER; note = 2'-fluoro-uridine
  modified_base 11: mod_base = OTHER; note = 2'-O-methyl-uridine
  modified_base 12: mod_base = OTHER; note = 2'-O-methyl-guanosine
  modified_base 13: mod_base = OTHER; note = 2'-O-methyl-uridine
  modified_base 14: mod_base = OTHER; note = 2'-fluoro-uridine
  modified_base 15: mod_base = OTHER; note = 2'-O-methyl-guanosine
  modified_base 16: mod_base = OTHER; note = 2'-fluoro-guanosine
  modified_base 17: mod_base = OTHER; note = 2'-O-methyl-adenosine
  modified_base 18: mod_base = OTHER; note = 2'-O-methyl-adenosine
  modified_base 19: mod_base = OTHER; note = 2'-O-methyl-cytidine
  modified_base 20: mod_base = OTHER; note = 2'-O-methyl-uridine with phosphorothioate linkage
  modified_base 21: mod_base = OTHER; note = 2'-O-methyl-adenosine with phosphorothioate linkage
  modified_base 22: mod_base = OTHER; note = 2'-O-methyl-uridine
ttggtaacattgttggaactat

SEQ ID NO: 285 - RNA, 22 nt, synthetic construct
  source 1..22: mol_type = other RNA
  modified_base 1: mod_base = OTHER; note = 2'-O-methyl-uridine with phosphorothioate linkage
  modified_base 2: mod_base = OTHER; note = 2'-fluoro-uridine with phosphorothioate linkage
  modified_base 3: mod_base = OTHER; note = 2'-fluoro-uridine
  modified_base 4: mod_base = OTHER; note = 2'-O-methyl-guanosine
  modified_base 5: mod_base = OTHER; note = 2'-fluoro-guanosine
  modified_base 6: mod_base = OTHER; note = 2'-O-methyl-uridine
  modified_base 7: mod_base = OTHER; note = 2'-fluoro-adenosine
  modified_base 8: mod_base = OTHER; note = 2'-O-methyl-adenosine
  modified_base 9: mod_base = OTHER; note = 2'-O-methyl-cytidine
  modified_base 10: mod_base = OTHER; note = 2'-fluoro-adenosine
  modified_base 11: mod_base = OTHER; note = 2'-O-methyl-uridine
  modified_base 12: mod_base = OTHER; note = 2'-O-methyl-uridine
  modified_base 13: mod_base = OTHER; note = 2'-O-methyl-guanosine
  modified_base 14: mod_base = OTHER; note = 2'-fluoro-uridine
  modified_base 15: mod_base = OTHER; note = 2'-O-methyl-uridine
  modified_base 16: mod_base = OTHER; note = 2'-fluoro-guanosine
  modified_base 17: mod_base = OTHER; note = 2'-O-methyl-guanosine
  modified_base 18: mod_base = OTHER; note = 2'-O-methyl-adenosine
  modified_base 19: mod_base = OTHER; note = 2'-O-methyl-adenosine
  modified_base 20: mod_base = OTHER; note = 2'-O-methyl-cytidine with phosphorothioate linkage
  modified_base 21: mod_base = OTHER; note = 2'-O-methyl-uridine with phosphorothioate linkage
  modified_base 22: mod_base = OTHER; note = 2'-O-methyl-adenosine
tttggtaacattgttggaacta

SEQ ID NO: 286 - RNA, 22 nt, synthetic construct
  source 1..22: mol_type = other RNA
  modified_base 1: mod_base = OTHER; note = 2'-O-methyl-uridine with phosphorothioate linkage
  modified_base 2: mod_base = OTHER; note = 2'-fluoro-uridine with phosphorothioate linkage
  modified_base 3: mod_base = OTHER; note = 2'-fluoro-uridine
  modified_base 4: mod_base = OTHER; note = 2'-O-methyl-uridine
  modified_base 5: mod_base = OTHER; note = 2'-fluoro-guanosine
  modified_base 6: mod_base = OTHER; note = 2'-O-methyl-guanosine
  modified_base 7: mod_base = OTHER; note = 2'-fluoro-uridine
  modified_base 8: mod_base = OTHER; note = 2'-O-methyl-adenosine
  modified_base 9: mod_base = OTHER; note = 2'-O-methyl-adenosine
  modified_base 10: mod_base = OTHER; note = 2'-fluoro-cytidine
  modified_base 11: mod_base = OTHER; note = 2'-O-methyl-adenosine
  modified_base 12: mod_base = OTHER; note = 2'-O-methyl-uridine
  modified_base 13: mod_base = OTHER; note = 2'-O-methyl-uridine
  modified_base 14: mod_base = OTHER; note = 2'-fluoro-guanosine
  modified_base 15: mod_base = OTHER; note = 2'-O-methyl-uridine
  modified_base 16: mod_base = OTHER; note = 2'-fluoro-uridine
  modified_base 17: mod_base = OTHER; note = 2'-O-methyl-guanosine
  modified_base 18: mod_base = OTHER; note = 2'-O-methyl-guanosine
  modified_base 19: mod_base = OTHER; note = 2'-O-methyl-adenosine
  modified_base 20: mod_base = OTHER; note = 2'-O-methyl-adenosine with phosphorothioate linkage
  modified_base 21: mod_base = OTHER; note = 2'-O-methyl-cytidine with phosphorothioate linkage
  modified_base 22: mod_base = OTHER; note = 2'-O-methyl-uridine
ttttggtaacattgttggaact

SEQ ID NO: 287 - RNA, 22 nt, synthetic construct
  source 1..22: mol_type = other RNA
  modified_base 1: mod_base = OTHER; note = 2'-O-methyl-uridine with phosphorothioate linkage
  modified_base 2: mod_base = OTHER; note = 2'-fluoro-uridine with phosphorothioate linkage
  modified_base 3: mod_base = OTHER; note = 2'-fluoro-uridine
  modified_base 4: mod_base = OTHER; note = 2'-O-methyl-uridine
  modified_base 5: mod_base = OTHER; note = 2'-fluoro-uridine
  modified_base 6: mod_base = OTHER; note = 2'-O-methyl-guanosine
  modified_base 7: mod_base = OTHER; note = 2'-fluoro-guanosine
  modified_base 8: mod_base = OTHER; note = 2'-O-methyl-uridine
  modified_base 9: mod_base = OTHER; note = 2'-O-methyl-adenosine
  modified_base 10: mod_base = OTHER; note = 2'-fluoro-adenosine
  modified_base 11: mod_base = OTHER; note = 2'-O-methyl-cytidine
  modified_base 12: mod_base = OTHER; note = 2'-O-methyl-adenosine
  modified_base 13: mod_base = OTHER; note = 2'-O-methyl-uridine
  modified_base 14: mod_base = OTHER; note = 2'-fluoro-uridine
  modified_base 15: mod_base = OTHER; note = 2'-O-methyl-guanosine
  modified_base 16: mod_base = OTHER; note = 2'-fluoro-uridine
  modified_base 17: mod_base = OTHER; note = 2'-O-methyl-uridine
  modified_base 18: mod_base = OTHER; note = 2'-O-methyl-guanosine
  modified_base 19: mod_base = OTHER; note = 2'-O-methyl-guanosine
  modified_base 20: mod_base = OTHER; note = 2'-O-methyl-adenosine with phosphorothioate linkage
  modified_base 21: mod_base = OTHER; note = 2'-O-methyl-adenosine with phosphorothioate linkage
  modified_base 22: mod_base = OTHER; note = 2'-O-methyl-cytidine
tttttggtaacattgttggaac

SEQ ID NO: 288 - RNA, 22 nt, synthetic construct
  source 1..22: mol_type = other RNA
  modified_base 1: mod_base = OTHER; note = 2'-O-methyl-uridine with phosphorothioate linkage
  modified_base 2: mod_base = OTHER; note = 2'-fluoro-guanosine with phosphorothioate linkage
  modified_base 3: mod_base = OTHER; note = 2'-fluoro-guanosine
  modified_base 4: mod_base = OTHER; note = 2'-O-methyl-uridine
  modified_base 5: mod_base = OTHER; note = 2'-fluoro-uridine
  modified_base 6: mod_base = OTHER; note = 2'-O-methyl-uridine
  modified_base 7: mod_base = OTHER; note = 2'-fluoro-uridine
  modified_base 8: mod_base = OTHER; note = 2'-O-methyl-guanosine
  modified_base 9: mod_base = OTHER; note = 2'-O-methyl-guanosine
  modified_base 10: mod_base = OTHER; note = 2'-fluoro-uridine
  modified_base 11: mod_base = OTHER; note = 2'-O-methyl-adenosine
  modified_base 12: mod_base = OTHER; note = 2'-O-methyl-adenosine
  modified_base 13: mod_base = OTHER; note = 2'-O-methyl-cytidine
  modified_base 14: mod_base = OTHER; note = 2'-fluoro-adenosine
  modified_base 15: mod_base = OTHER; note = 2'-O-methyl-uridine
  modified_base 16: mod_base = OTHER; note = 2'-fluoro-uridine
  modified_base 17: mod_base = OTHER; note = 2'-O-methyl-guanosine
  modified_base 18: mod_base = OTHER; note = 2'-O-methyl-uridine
  modified_base 19: mod_base = OTHER; note = 2'-O-methyl-uridine
  modified_base 20: mod_base = OTHER; note = 2'-O-methyl-guanosine with phosphorothioate linkage
  modified_base 21: mod_base = OTHER; note = 2'-O-methyl-guanosine with phosphorothioate linkage
  modified_base 22: mod_base = OTHER; note = 2'-O-methyl-adenosine
tggttttggtaacattgttgga

SEQ ID NO: 289 - RNA, 22 nt, synthetic construct
  source 1..22: mol_type = other RNA
  modified_base 1: mod_base = OTHER; note = 2'-O-methyl-uridine with phosphorothioate linkage
  modified_base 2: mod_base = OTHER; note = 2'-fluoro-uridine with phosphorothioate linkage
  modified_base 3: mod_base = OTHER; note = 2'-fluoro-cytidine
  modified_base 4: mod_base = OTHER; note = 2'-O-methyl-guanosine
  modified_base 5: mod_base = OTHER; note = 2'-fluoro-guanosine
  modified_base 6: mod_base = OTHER; note = 2'-O-methyl-uridine
  modified_base 7: mod_base = OTHER; note = 2'-fluoro-uridine
  modified_base 8: mod_base = OTHER; note = 2'-O-methyl-uridine
  modified_base 9: mod_base = OTHER; note = 2'-O-methyl-uridine
  modified_base 10: mod_base = OTHER; note = 2'-fluoro-guanosine
  modified_base 11: mod_base = OTHER; note = 2'-O-methyl-guanosine
  modified_base 12: mod_base = OTHER; note = 2'-O-methyl-uridine
  modified_base 13: mod_base = OTHER; note = 2'-O-methyl-adenosine
  modified_base 14: mod_base = OTHER; note = 2'-fluoro-adenosine
  modified_base 15: mod_base = OTHER; note = 2'-O-methyl-cytidine
  modified_base 16: mod_base = OTHER; note = 2'-fluoro-adenosine
  modified_base 17: mod_base = OTHER; note = 2'-O-methyl-uridine
  modified_base 18: mod_base = OTHER; note = 2'-O-methyl-uridine
  modified_base 19: mod_base = OTHER; note = 2'-O-methyl-guanosine
  modified_base 20: mod_base = OTHER; note = 2'-O-methyl-uridine with phosphorothioate linkage
  modified_base 21: mod_base = OTHER; note = 2'-O-methyl-uridine with phosphorothioate linkage
  modified_base 22: mod_base = OTHER; note = 2'-O-methyl-guanosine
ttcggttttggtaacattgttg

SEQ ID NO: 290 - RNA, 22 nt, synthetic construct
  source 1..22: mol_type = other RNA
  modified_base 1: mod_base = OTHER; note = 2'-O-methyl-uridine with phosphorothioate linkage
  modified_base 2: mod_base = OTHER; note = 2'-fluoro-adenosine with phosphorothioate linkage
  modified_base 3: mod_base = OTHER; note = 2'-fluoro-uridine
  modified_base 4: mod_base = OTHER; note = 2'-O-methyl-uridine
  modified_base 5: mod_base = OTHER; note = 2'-fluoro-cytidine
  modified_base 6: mod_base = OTHER; note = 2'-O-methyl-guanosine
  modified_base 7: mod_base = OTHER; note = 2'-fluoro-guanosine
  modified_base 8: mod_base = OTHER; note = 2'-O-methyl-uridine
  modified_base 9: mod_base = OTHER; note = 2'-O-methyl-uridine
  modified_base 10: mod_base = OTHER; note = 2'-fluoro-uridine
  modified_base 11: mod_base = OTHER; note = 2'-O-methyl-uridine
  modified_base 12: mod_base = OTHER; note = 2'-O-methyl-guanosine
  modified_base 13: mod_base = OTHER; note = 2'-O-methyl-guanosine
  modified_base 14: mod_base = OTHER; note = 2'-fluoro-uridine
  modified_base 15: mod_base = OTHER; note = 2'-O-methyl-adenosine
  modified_base 16: mod_base = OTHER; note = 2'-fluoro-adenosine
  modified_base 17: mod_base = OTHER; note = 2'-O-methyl-cytidine
  modified_base 18: mod_base = OTHER; note = 2'-O-methyl-adenosine
  modified_base 19: mod_base = OTHER; note = 2'-O-methyl-uridine
  modified_base 20: mod_base = OTHER; note = 2'-O-methyl-uridine with phosphorothioate linkage
  modified_base 21: mod_base = OTHER; note = 2'-O-methyl-guanosine with phosphorothioate linkage
  modified_base 22: mod_base = OTHER; note = 2'-O-methyl-uridine
tattcggttttggtaacattgt

SEQ ID NO: 291 - RNA, 22 nt, synthetic construct
  source 1..22: mol_type = other RNA
  modified_base 1: mod_base = OTHER; note = 2'-O-methyl-uridine with phosphorothioate linkage
  modified_base 2: mod_base = OTHER; note = 2'-fluoro-guanosine with phosphorothioate linkage
  modified_base 3: mod_base = OTHER; note = 2'-fluoro-cytidine
  modified_base 4: mod_base = OTHER; note = 2'-O-methyl-adenosine
  modified_base 5: mod_base = OTHER; note = 2'-fluoro-uridine
  modified_base 6: mod_base = OTHER; note = 2'-O-methyl-uridine
  modified_base 7: mod_base = OTHER; note = 2'-fluoro-cytidine
  modified_base 8: mod_base = OTHER; note = 2'-O-methyl-guanosine
  modified_base 9: mod_base = OTHER; note = 2'-O-methyl-guanosine
  modified_base 10: mod_base = OTHER; note = 2'-fluoro-uridine
  modified_base 11: mod_base = OTHER; note = 2'-O-methyl-uridine
  modified_base 12: mod_base = OTHER; note = 2'-O-methyl-uridine
  modified_base 13: mod_base = OTHER; note = 2'-O-methyl-uridine
  modified_base 14: mod_base = OTHER; note = 2'-fluoro-guanosine
  modified_base 15: mod_base = OTHER; note = 2'-O-methyl-guanosine
  modified_base 16: mod_base = OTHER; note = 2'-fluoro-uridine
  modified_base 17: mod_base = OTHER; note = 2'-O-methyl-adenosine
  modified_base 18: mod_base = OTHER; note = 2'-O-methyl-adenosine
  modified_base 19: mod_base = OTHER; note = 2'-O-methyl-cytidine
  modified_base 20: mod_base = OTHER; note = 2'-O-methyl-adenosine with phosphorothioate linkage
  modified_base 21: mod_base = OTHER; note = 2'-O-methyl-uridine with phosphorothioate linkage
  modified_base 22: mod_base = OTHER; note = 2'-O-methyl-uridine
tgcattcggttttggtaacatt

SEQ ID NO: 292 - RNA, 22 nt, synthetic construct
  source 1..22: mol_type = other RNA
  modified_base 1: mod_base = OTHER; note = 2'-O-methyl-uridine with phosphorothioate linkage
  modified_base 2: mod_base = OTHER; note = 2'-fluoro-cytidine with phosphorothioate linkage
  modified_base 3: mod_base = OTHER; note = 2'-fluoro-adenosine
  modified_base 4: mod_base = OTHER; note = 2'-O-methyl-guanosine
  modified_base 5: mod_base = OTHER; note = 2'-fluoro-cytidine
  modified_base 6: mod_base = OTHER; note = 2'-O-methyl-adenosine
  modified_base 7: mod_base = OTHER; note = 2'-fluoro-uridine
  modified_base 8: mod_base = OTHER; note = 2'-O-methyl-uridine
  modified_base 9: mod_base = OTHER; note = 2'-O-methyl-cytidine
  modified_base 10: mod_base = OTHER; note = 2'-fluoro-guanosine
  modified_base 11: mod_base = OTHER; note = 2'-O-methyl-guanosine
  modified_base 12: mod_base = OTHER; note = 2'-O-methyl-uridine
  modified_base 13: mod_base = OTHER; note = 2'-O-methyl-uridine
  modified_base 14: mod_base = OTHER; note = 2'-fluoro-uridine
  modified_base 15: mod_base = OTHER; note = 2'-O-methyl-uridine
  modified_base 16: mod_base = OTHER; note = 2'-fluoro-guanosine
  modified_base 17: mod_base = OTHER; note = 2'-O-methyl-guanosine
  modified_base 18: mod_base = OTHER; note = 2'-O-methyl-uridine
  modified_base 19: mod_base = OTHER; note = 2'-O-methyl-adenosine
  modified_base 20: mod_base = OTHER; note = 2'-O-methyl-adenosine with phosphorothioate linkage
  modified_base 21: mod_base = OTHER; note = 2'-O-methyl-cytidine with phosphorothioate linkage
  modified_base 22: mod_base = OTHER; note = 2'-O-methyl-adenosine
tcagcattcggttttggtaaca

SEQ ID NO: 293 - RNA, 22 nt, synthetic construct
  source 1..22: mol_type = other RNA
  modified_base 1: mod_base = OTHER; note = 2'-O-methyl-uridine with phosphorothioate linkage
  modified_base 2: mod_base = OTHER; note = 2'-fluoro-adenosine with phosphorothioate linkage
  modified_base 3: mod_base = OTHER; note = 2'-fluoro-adenosine
  modified_base 4: mod_base = OTHER; note = 2'-O-methyl-guanosine
  modified_base 5: mod_base = OTHER; note = 2'-fluoro-uridine
  modified_base 6: mod_base = OTHER; note = 2'-O-methyl-uridine
  modified_base 7: mod_base = OTHER; note = 2'-fluoro-guanosine
  modified_base 8: mod_base = OTHER; note = 2'-O-methyl-adenosine
  modified_base 9: mod_base = OTHER; note = 2'-O-methyl-guanosine
  modified_base 10: mod_base = OTHER; note = 2'-fluoro-uridine
  modified_base 11: mod_base = OTHER; note = 2'-O-methyl-cytidine
  modified_base 12: mod_base = OTHER; note = 2'-O-methyl-cytidine
  modified_base 13: mod_base = OTHER; note = 2'-O-methyl-adenosine
  modified_base 14: mod_base = OTHER; note = 2'-fluoro-adenosine
  modified_base 15: mod_base = OTHER; note = 2'-O-methyl-guanosine
  modified_base 16: mod_base = OTHER; note = 2'-fluoro-uridine
  modified_base 17: mod_base = OTHER; note = 2'-O-methyl-uridine
  modified_base 18: mod_base = OTHER; note = 2'-O-methyl-cytidine
  modified_base 19: mod_base = OTHER; note = 2'-O-methyl-cytidine
  modified_base 20: mod_base = OTHER; note = 2'-O-methyl-adenosine with phosphorothioate linkage
  modified_base 21: mod_base = OTHER; note = 2'-O-methyl-uridine with phosphorothioate linkage
  modified_base 22: mod_base = OTHER; note = 2'-O-methyl-uridine
taagttgagtccaagttccatt

SEQ ID NO: 294 - RNA, 22 nt, synthetic construct
  source 1..22: mol_type = other RNA
  modified_base 1: mod_base = OTHER; note = 2'-O-methyl-uridine with phosphorothioate linkage
  modified_base 2: mod_base = OTHER; note = 2'-fluoro-cytidine with phosphorothioate linkage
  modified_base 3: mod_base = OTHER; note = 2'-fluoro-adenosine
  modified_base 4: mod_base = OTHER; note = 2'-O-methyl-adenosine
  modified_base 5: mod_base = OTHER; note = 2'-fluoro-adenosine
  modified_base 6: mod_base = OTHER; note = 2'-O-methyl-guanosine
  modified_base 7: mod_base = OTHER; note = 2'-fluoro-uridine
  modified_base 8: mod_base = OTHER; note = 2'-O-methyl-uridine
  modified_base 9: mod_base = OTHER; note = 2'-O-methyl-guanosine
  modified_base 10: mod_base = OTHER; note = 2'-fluoro-adenosine
  modified_base 11: mod_base = OTHER; note = 2'-O-methyl-guanosine
  modified_base 12: mod_base = OTHER; note = 2'-O-methyl-uridine
  modified_base 13: mod_base = OTHER; note = 2'-O-methyl-cytidine
  modified_base 14: mod_base = OTHER; note = 2'-fluoro-cytidine
  modified_base 15: mod_base = OTHER; note = 2'-O-methyl-adenosine
  modified_base 16: mod_base = OTHER; note = 2'-fluoro-adenosine
  modified_base 17: mod_base = OTHER; note = 2'-O-methyl-guanosine
  modified_base 18: mod_base = OTHER; note = 2'-O-methyl-uridine
  modified_base 19: mod_base = OTHER; note = 2'-O-methyl-uridine
  modified_base 20: mod_base = OTHER; note = 2'-O-methyl-cytidine with phosphorothioate linkage
  modified_base 21: mod_base = OTHER; note = 2'-O-methyl-cytidine with phosphorothioate linkage
  modified_base 22: mod_base = OTHER; note = 2'-O-methyl-adenosine
tcaaagttgagtccaagttcca

SEQ ID NO: 295 - RNA, 22 nt, synthetic construct
  source 1..22: mol_type = other RNA
  modified_base 1: mod_base = OTHER; note = 2'-O-methyl-uridine with phosphorothioate linkage
  modified_base 2: mod_base = OTHER; note = 2'-fluoro-guanosine with phosphorothioate linkage
  modified_base 3: mod_base = OTHER; note = 2'-fluoro-cytidine
  modified_base 4: mod_base = OTHER; note = 2'-O-methyl-cytidine
  modified_base 5: mod_base = OTHER; note = 2'-fluoro-adenosine
  modified_base 6: mod_base = OTHER; note = 2'-O-methyl-adenosine
  modified_base 7: mod_base = OTHER; note = 2'-fluoro-adenosine
  modified_base 8: mod_base = OTHER; note = 2'-O-methyl-guanosine
  modified_base 9: mod_base = OTHER; note = 2'-O-methyl-uridine
  modified_base 10: mod_base = OTHER; note = 2'-fluoro-uridine
  modified_base 11: mod_base = OTHER; note = 2'-O-methyl-guanosine
  modified_base 12: mod_base = OTHER; note = 2'-O-methyl-adenosine
  modified_base 13: mod_base = OTHER; note = 2'-O-methyl-guanosine
  modified_base 14: mod_base = OTHER; note = 2'-fluoro-uridine
  modified_base 15: mod_base = OTHER; note = 2'-O-methyl-cytidine
  modified_base 16: mod_base = OTHER; note = 2'-fluoro-cytidine
  modified_base 17: mod_base = OTHER; note = 2'-O-methyl-adenosine
  modified_base 18: mod_base = OTHER; note = 2'-O-methyl-adenosine
  modified_base 19: mod_base = OTHER; note = 2'-O-methyl-guanosine
  modified_base 20: mod_base = OTHER; note = 2'-O-methyl-uridine with phosphorothioate linkage
  modified_base 21: mod_base = OTHER; note = 2'-O-methyl-uridine with phosphorothioate linkage
  modified_base 22: mod_base = OTHER; note = 2'-O-methyl-cytidine
tgccaaagttgagtccaagttc

SEQ ID NO: 296 - RNA, 22 nt, synthetic construct
  source 1..22: mol_type = other RNA
  modified_base 1: mod_base = OTHER; note = 2'-O-methyl-uridine with phosphorothioate linkage
  modified_base 2: mod_base = OTHER; note = 2'-fluoro-cytidine with phosphorothioate linkage
  modified_base 3: mod_base = OTHER; note = 2'-fluoro-adenosine
  modified_base 4: mod_base = OTHER; note = 2'-O-methyl-guanosine
  modified_base 5: mod_base = OTHER; note = 2'-fluoro-cytidine
  modified_base 6: mod_base = OTHER; note = 2'-O-methyl-cytidine
  modified_base 7: mod_base = OTHER; note = 2'-fluoro-adenosine
  modified_base 8: mod_base = OTHER; note = 2'-O-methyl-adenosine
  modified_base 9: mod_base = OTHER; note = 2'-O-methyl-adenosine
  modified_base 10: mod_base = OTHER; note = 2'-fluoro-guanosine
  modified_base 11: mod_base = OTHER; note = 2'-O-methyl-uridine
  modified_base 12: mod_base = OTHER; note = 2'-O-methyl-uridine
  modified_base 13: mod_base = OTHER; note = 2'-O-methyl-guanosine
  modified_base 14: mod_base = OTHER; note = 2'-fluoro-adenosine
  modified_base 15: mod_base = OTHER; note = 2'-O-methyl-guanosine
  modified_base 16: mod_base = OTHER; note = 2'-fluoro-uridine
  modified_base 17: mod_base = OTHER; note = 2'-O-methyl-cytidine
  modified_base 18: mod_base = OTHER; note = 2'-O-methyl-cytidine
  modified_base 19: mod_base = OTHER; note = 2'-O-methyl-adenosine
  modified_base 20: mod_base = OTHER; note = 2'-O-methyl-adenosine with phosphorothioate linkage
  modified_base 21: mod_base = OTHER; note = 2'-O-methyl-guanosine with phosphorothioate linkage
  modified_base 22: mod_base = OTHER; note = 2'-O-methyl-uridine
tcagccaaagttgagtccaagt

SEQ ID NO: 297 - RNA, 22 nt, synthetic construct
  source 1..22: mol_type = other RNA
  modified_base 1: mod_base = OTHER; note = 2'-O-methyl-uridine with phosphorothioate linkage
  modified_base 2: mod_base = OTHER; note = 2'-fluoro-adenosine with phosphorothioate linkage
  modified_base 3: mod_base = OTHER; note = 2'-fluoro-cytidine
  modified_base 4: mod_base = OTHER; note = 2'-O-methyl-cytidine
  modified_base 5: mod_base = OTHER; note = 2'-fluoro-adenosine
  modified_base 6: mod_base = OTHER; note = 2'-O-methyl-guanosine
  modified_base 7: mod_base = OTHER; note = 2'-fluoro-cytidine
  modified_base 8: mod_base = OTHER; note = 2'-O-methyl-cytidine
  modified_base 9: mod_base = OTHER; note = 2'-O-methyl-adenosine
  modified_base 10: mod_base = OTHER; note = 2'-fluoro-adenosine
  modified_base 11: mod_base = OTHER; note = 2'-O-methyl-adenosine
  modified_base 12: mod_base = OTHER; note = 2'-O-methyl-guanosine
  modified_base 13: mod_base = OTHER; note = 2'-O-methyl-uridine
  modified_base 14: mod_base = OTHER; note = 2'-fluoro-uridine
  modified_base 15: mod_base = OTHER; note = 2'-O-methyl-guanosine
  modified_base 16: mod_base = OTHER; note = 2'-fluoro-adenosine
  modified_base 17: mod_base = OTHER; note = 2'-O-methyl-guanosine
  modified_base 18: mod_base = OTHER; note = 2'-O-methyl-uridine
  modified_base 19: mod_base = OTHER; note = 2'-O-methyl-cytidine
  modified_base 20: mod_base = OTHER; note = 2'-O-methyl-cytidine with phosphorothioate linkage
  modified_base 21: mod_base = OTHER; note = 2'-O-methyl-adenosine with phosphorothioate linkage
  modified_base 22: mod_base = OTHER; note = 2'-O-methyl-adenosine
taccagccaaagttgagtccaa

SEQ ID NO: 298 - RNA, 22 nt, synthetic construct
  source 1..22: mol_type = other RNA
  modified_base 1: mod_base = OTHER; note = 2'-O-methyl-uridine with phosphorothioate linkage
  modified_base 2: mod_base = OTHER; note = 2'-fluoro-adenosine with phosphorothioate linkage
  modified_base 3: mod_base = OTHER; note = 2'-fluoro-uridine
  modified_base 4: mod_base = OTHER; note = 2'-O-methyl-adenosine
  modified_base 5: mod_base = OTHER; note = 2'-fluoro-cytidine
  modified_base 6: mod_base = OTHER; note = 2'-O-methyl-cytidine
  modified_base 7: mod_base = OTHER; note = 2'-fluoro-adenosine
  modified_base 8: mod_base = OTHER; note = 2'-O-methyl-guanosine
  modified_base 9: mod_base = OTHER; note = 2'-O-methyl-cytidine
  modified_base 10: mod_base = OTHER; note = 2'-fluoro-cytidine
  modified_base 11: mod_base = OTHER; note = 2'-O-methyl-adenosine
  modified_base 12: mod_base = OTHER; note = 2'-O-methyl-adenosine
  modified_base 13: mod_base = OTHER; note = 2'-O-methyl-adenosine
  modified_base 14: mod_base = OTHER; note = 2'-fluoro-guanosine
  modified_base 15: mod_base = OTHER; note = 2'-O-methyl-uridine
  modified_base 16: mod_base = OTHER; note = 2'-fluoro-uridine
  modified_base 17: mod_base = OTHER; note = 2'-O-methyl-guanosine
  modified_base 18: mod_base = OTHER; note = 2'-O-methyl-adenosine
  modified_base 19: mod_base = OTHER; note = 2'-O-methyl-guanosine
  modified_base 20: mod_base = OTHER; note = 2'-O-methyl-uridine with phosphorothioate linkage
  modified_base 21: mod_base = OTHER; note = 2'-O-methyl-cytidine with phosphorothioate linkage
  modified_base 22: mod_base = OTHER; note = 2'-O-methyl-cytidine
tataccagccaaagttgagtcc

SEQ ID NO: 299 - RNA, 22 nt, synthetic construct
  source 1..22: mol_type = other RNA
  modified_base 1: mod_base = OTHER; note = 2'-O-methyl-uridine with phosphorothioate linkage
  modified_base 2: mod_base = OTHER; note = 2'-fluoro-guanosine with phosphorothioate linkage
  modified_base 3: mod_base = OTHER; note = 2'-fluoro-adenosine
  modified_base 4: mod_base = OTHER; note = 2'-O-methyl-uridine
  modified_base 5: mod_base = OTHER; note = 2'-fluoro-adenosine
  modified_base 6: mod_base = OTHER; note = 2'-O-methyl-cytidine
  modified_base 7: mod_base = OTHER; note = 2'-fluoro-cytidine
  modified_base 8: mod_base = OTHER; note = 2'-O-methyl-adenosine
  modified_base 9: mod_base = OTHER; note = 2'-O-methyl-guanosine
  modified_base 10: mod_base = OTHER; note = 2'-fluoro-cytidine
  modified_base 11: mod_base = OTHER; note = 2'-O-methyl-cytidine
  modified_base 12: mod_base = OTHER; note = 2'-O-methyl-adenosine
  modified_base 13: mod_base = OTHER; note = 2'-O-methyl-adenosine
  modified_base 14: mod_base = OTHER; note = 2'-fluoro-adenosine
  modified_base 15: mod_base = OTHER; note = 2'-O-methyl-guanosine
  modified_base 16: mod_base = OTHER; note = 2'-fluoro-uridine
  modified_base 17: mod_base = OTHER; note = 2'-O-methyl-uridine
  modified_base 18: mod_base = OTHER; note = 2'-O-methyl-guanosine
  modified_base 19: mod_base = OTHER; note = 2'-O-methyl-adenosine
  modified_base 20: mod_base = OTHER; note = 2'-O-methyl-guanosine with phosphorothioate linkage
  modified_base 21: mod_base = OTHER; note = 2'-O-methyl-uridine with phosphorothioate linkage
  modified_base 22: mod_base = OTHER; note = 2'-O-methyl-cytidine
tgataccagccaaagttgagtc

SEQ ID NO: 300 - RNA, 22 nt, synthetic construct
  source 1..22: mol_type = other RNA
  modified_base 1: mod_base = OTHER; note = 2'-O-methyl-uridine with phosphorothioate linkage
  modified_base 2: mod_base = OTHER; note = 2'-fluoro-adenosine with phosphorothioate linkage
  modified_base 3: mod_base = OTHER; note = 2'-fluoro-guanosine
  modified_base 4: mod_base = OTHER; note = 2'-O-methyl-adenosine
  modified_base 5: mod_base = OTHER; note = 2'-fluoro-uridine
  modified_base 6: mod_base = OTHER; note = 2'-O-methyl-adenosine
  modified_base 7: mod_base = OTHER; note = 2'-fluoro-cytidine
  modified_base 8: mod_base = OTHER; note = 2'-O-methyl-cytidine
  modified_base 9: mod_base = OTHER; note = 2'-O-methyl-adenosine
  modified_base 10: mod_base = OTHER; note = 2'-fluoro-guanosine
  modified_base 11: mod_base = OTHER; note = 2'-O-methyl-cytidine
  modified_base 12: mod_base = OTHER; note = 2'-O-methyl-cytidine
  modified_base 13: mod_base = OTHER; note = 2'-O-methyl-adenosine
  modified_base 14: mod_base = OTHER; note = 2'-fluoro-adenosine
  modified_base 15: mod_base = OTHER; note = 2'-O-methyl-adenosine
  modified_base 16: mod_base = OTHER; note = 2'-fluoro-guanosine
  modified_base 17: mod_base = OTHER; note = 2'-O-methyl-uridine
  modified_base 18: mod_base = OTHER; note = 2'-O-methyl-uridine
  modified_base 19: mod_base = OTHER; note = 2'-O-methyl-guanosine
  modified_base 20: mod_base = OTHER; note = 2'-O-methyl-adenosine with phosphorothioate linkage
  modified_base 21: mod_base = OTHER; note = 2'-O-methyl-guanosine with phosphorothioate linkage
  modified_base 22: mod_base = OTHER; note = 2'-O-methyl-uridine
tagataccagccaaagttgagt

SEQ ID NO: 301 - RNA, 22 nt, synthetic construct
  source 1..22: mol_type = other RNA
  modified_base 1: mod_base = OTHER; note = 2'-O-methyl-uridine with phosphorothioate linkage
  modified_base 2: mod_base = OTHER; note = 2'-fluoro-uridine with phosphorothioate linkage
  modified_base 3: mod_base = OTHER; note = 2'-fluoro-cytidine
  modified_base 4: mod_base = OTHER; note = 2'-O-methyl-adenosine
  modified_base 5: mod_base = OTHER; note = 2'-fluoro-guanosine
  modified_base 6: mod_base = OTHER; note = 2'-O-methyl-adenosine
  modified_base 7: mod_base = OTHER; note = 2'-fluoro-uridine
  modified_base 8: mod_base = OTHER; note = 2'-O-methyl-adenosine
  modified_base 9: mod_base = OTHER; note = 2'-O-methyl-cytidine
  modified_base 10: mod_base = OTHER; note = 2'-fluoro-cytidine
  modified_base 11: mod_base = OTHER; note = 2'-O-methyl-adenosine
  modified_base 12: mod_base = OTHER; note = 2'-O-methyl-guanosine
  modified_base 13: mod_base = OTHER; note = 2'-O-methyl-cytidine
  modified_base 14: mod_base = OTHER; note = 2'-fluoro-cytidine
  modified_base 15: mod_base = OTHER; note = 2'-O-methyl-adenosine
  modified_base 16: mod_base = OTHER; note = 2'-fluoro-adenosine
  modified_base 17: mod_base = OTHER; note = 2'-O-methyl-adenosine
  modified_base 18: mod_base = OTHER; note = 2'-O-methyl-guanosine
  modified_base 19: mod_base = OTHER; note = 2'-O-methyl-uridine
  modified_base 20: mod_base = OTHER; note = 2'-O-methyl-uridine with phosphorothioate linkage
  modified_base 21: mod_base = OTHER; note = 2'-O-methyl-guanosine with phosphorothioate linkage
  modified_base 22: mod_base = OTHER; note = 2'-O-methyl-adenosine
ttcagataccagccaaagttga

SEQ ID NO: 302 - RNA, 22 nt, synthetic construct
  source 1..22: mol_type = other RNA
  modified_base 1: mod_base = OTHER; note = 2'-O-methyl-uridine with phosphorothioate linkage
  modified_base 2: mod_base = OTHER; note = 2'-fluoro-uridine with phosphorothioate linkage
  modified_base 3: mod_base = OTHER; note = 2'-fluoro-uridine
  modified_base 4: mod_base = OTHER; note = 2'-O-methyl-cytidine
  modified_base 5: mod_base = OTHER; note = 2'-fluoro-adenosine
  modified_base 6: mod_base = OTHER; note = 2'-O-methyl-guanosine
  modified_base 7: mod_base = OTHER; note = 2'-fluoro-adenosine
  modified_base 8: mod_base = OTHER; note = 2'-O-methyl-uridine
  modified_base 9: mod_base = OTHER; note = 2'-O-methyl-adenosine
  modified_base 10: mod_base = OTHER; note = 2'-fluoro-cytidine
  modified_base 11: mod_base = OTHER; note = 2'-O-methyl-cytidine
  modified_base 12: mod_base = OTHER; note = 2'-O-methyl-adenosine
  modified_base 13: mod_base = OTHER; note = 2'-O-methyl-guanosine
  modified_base 14: mod_base = OTHER; note = 2'-fluoro-cytidine
  modified_base 15: mod_base = OTHER; note = 2'-O-methyl-cytidine
  modified_base 16: mod_base = OTHER; note = 2'-fluoro-adenosine
  modified_base 17: mod_base = OTHER; note = 2'-O-methyl-adenosine
  modified_base 18: mod_base = OTHER; note = 2'-O-methyl-adenosine
  modified_base 19: mod_base = OTHER; note = 2'-O-methyl-guanosine
  modified_base 20: mod_base = OTHER; note = 2'-O-methyl-uridine with phosphorothioate linkage
  modified_base 21: mod_base = OTHER; note = 2'-O-methyl-uridine with phosphorothioate linkage
  modified_base 22: mod_base = OTHER; note = 2'-O-methyl-guanosine
tttcagataccagccaaagttg

SEQ ID NO: 303 - RNA, 22 nt, synthetic construct
  source 1..22: mol_type = other RNA
  modified_base 1: mod_base = OTHER; note = 2'-O-methyl-uridine with phosphorothioate linkage
  modified_base 2: mod_base = OTHER; note = 2'-fluoro-adenosine with phosphorothioate linkage
  modified_base 3: mod_base = OTHER; note = 2'-fluoro-uridine
  modified_base 4: mod_base = OTHER; note = 2'-O-methyl-uridine
  modified_base 5: mod_base = OTHER; note = 2'-fluoro-cytidine
  modified_base 6: mod_base = OTHER; note = 2'-O-methyl-adenosine
  modified_base 7: mod_base = OTHER; note = 2'-fluoro-guanosine
  modified_base 8: mod_base = OTHER; note = 2'-O-methyl-adenosine
  modified_base 9: mod_base = OTHER; note = 2'-O-methyl-uridine
  modified_base 10: mod_base = OTHER; note = 2'-fluoro-adenosine
  modified_base 11: mod_base = OTHER; note = 2'-O-methyl-cytidine
  modified_base 12: mod_base = OTHER; note = 2'-O-methyl-cytidine
  modified_base 13: mod_base = OTHER; note = 2'-O-methyl-adenosine
  modified_base 14: mod_base = OTHER; note = 2'-fluoro-guanosine
  modified_base 15: mod_base = OTHER; note = 2'-O-methyl-cytidine
  modified_base 16: mod_base = OTHER; note = 2'-fluoro-cytidine
  modified_base 17: mod_base = OTHER; note = 2'-O-methyl-adenosine
  modified_base 18: mod_base = OTHER; note = 2'-O-methyl-adenosine
  modified_base 19: mod_base = OTHER; note = 2'-O-methyl-adenosine
  modified_base 20: mod_base = OTHER; note = 2'-O-methyl-guanosine with phosphorothioate linkage
  modified_base 21: mod_base = OTHER; note = 2'-O-methyl-uridine with phosphorothioate linkage
  modified_base 22: mod_base = OTHER; note = 2'-O-methyl-uridine
tattcagataccagccaaagtt

SEQ ID NO: 304 - RNA, 22 nt, synthetic construct
  source 1..22: mol_type = other RNA
  modified_base 1: mod_base = OTHER; note = 2'-O-methyl-uridine with phosphorothioate linkage
  modified_base 2: mod_base = OTHER; note = 2'-fluoro-uridine with phosphorothioate linkage
  modified_base 3: mod_base = OTHER; note = 2'-fluoro-adenosine
  modified_base 4: mod_base = OTHER; note = 2'-O-methyl-uridine
  modified_base 5: mod_base = OTHER; note = 2'-fluoro-uridine
  modified_base 6: mod_base = OTHER; note = 2'-O-methyl-cytidine
  modified_base 7: mod_base = OTHER; note = 2'-fluoro-adenosine
  modified_base 8: mod_base = OTHER; note = 2'-O-methyl-guanosine
  modified_base 9: mod_base = OTHER; note = 2'-O-methyl-adenosine
  modified_base 10: mod_base = OTHER; note = 2'-fluoro-uridine
  modified_base 11: mod_base = OTHER; note = 2'-O-methyl-adenosine
  modified_base 12: mod_base = OTHER; note = 2'-O-methyl-cytidine
  modified_base 13: mod_base = OTHER; note = 2'-O-methyl-cytidine
  modified_base 14: mod_base = OTHER; note = 2'-fluoro-adenosine
  modified_base 15: mod_base = OTHER; note = 2'-O-methyl-guanosine
  modified_base 16: mod_base = OTHER; note = 2'-fluoro-cytidine
  modified_base 17: mod_base = OTHER; note = 2'-O-methyl-cytidine
  modified_base 18: mod_base = OTHER; note = 2'-O-methyl-adenosine
  modified_base 19: mod_base = OTHER; note = 2'-O-methyl-adenosine
  modified_base 20: mod_base = OTHER; note = 2'-O-methyl-adenosine with phosphorothioate linkage
  modified_base 21: mod_base = OTHER; note = 2'-O-methyl-guanosine with phosphorothioate linkage
  modified_base 22: mod_base = OTHER; note = 2'-O-methyl-uridine
ttattcagataccagccaaagt

SEQ ID NO: 305 - RNA, 22 nt, synthetic construct
  source 1..22: mol_type = other RNA
  modified_base 1: mod_base = OTHER; note = 2'-O-methyl-uridine with phosphorothioate linkage
  modified_base 2: mod_base = OTHER; note = 2'-fluoro-guanosine with phosphorothioate linkage
  modified_base 3: mod_base = OTHER; note = 2'-fluoro-guanosine
  modified_base 4: mod_base = OTHER; note = 2'-O-methyl-adenosine
  modified_base 5: mod_base = OTHER; note = 2'-fluoro-guanosine
  modified_base 6: mod_base = OTHER; note = 2'-O-methyl-cytidine
  modified_base 7: mod_base = OTHER; note = 2'-fluoro-cytidine
  modified_base 8: mod_base = OTHER; note = 2'-O-methyl-cytidine
  modified_base 9: mod_base = OTHER; note = 2'-O-methyl-uridine
  modified_base 10: mod_base = OTHER; note = 2'-fluoro-guanosine
  modified_base 11: mod_base = OTHER; note = 2'-O-methyl-uridine
  modified_base 12: mod_base = OTHER; note = 2'-O-methyl-uridine
  modified_base 13: mod_base = OTHER; note = 2'-O-methyl-cytidine
  modified_base 14: mod_base = OTHER; note = 2'-fluoro-adenosine
  modified_base 15: mod_base = OTHER; note = 2'-O-methyl-uridine
  modified_base 16: mod_base = OTHER; note = 2'-fluoro-guanosine
  modified_base 17: mod_base = OTHER; note = 2'-O-methyl-adenosine
  modified_base 18: mod_base = OTHER; note = 2'-O-methyl-uridine
  modified_base 19: mod_base = OTHER; note = 2'-O-methyl-adenosine
  modified_base 20: mod_base = OTHER; note = 2'-O-methyl-uridine with phosphorothioate linkage
  modified_base 21: mod_base = OTHER; note = 2'-O-methyl-uridine with phosphorothioate linkage
  modified_base 22: mod_base = OTHER; note = 2'-O-methyl-cytidine
tggagccctgttcatgatattc

SEQ ID NO: 306 - RNA, 22 nt, synthetic construct
  source 1..22: mol_type = other RNA
  modified_base 1: mod_base = OTHER; note = 2'-O-methyl-uridine with phosphorothioate linkage
  modified_base 2: mod_base = OTHER; note = 2'-fluoro-adenosine with phosphorothioate linkage
  modified_base 3: mod_base = OTHER; note = 2'-fluoro-guanosine
  modified_base 4: mod_base = OTHER; note = 2'-O-methyl-guanosine
  modified_base 5: mod_base = OTHER; note = 2'-fluoro-adenosine
  modified_base 6: mod_base = OTHER; note = 2'-O-methyl-guanosine
  modified_base 7: mod_base = OTHER; note = 2'-fluoro-cytidine
  modified_base 8: mod_base = OTHER; note = 2'-O-methyl-cytidine
  modified_base 9: mod_base = OTHER; note = 2'-O-methyl-cytidine
  modified_base 10: mod_base = OTHER; note = 2'-fluoro-uridine
  modified_base 11: mod_base = OTHER; note = 2'-O-methyl-guanosine
  modified_base 12: mod_base = OTHER; note = 2'-O-methyl-uridine
  modified_base 13: mod_base = OTHER; note = 2'-O-methyl-uridine
  modified_base 14: mod_base = OTHER; note = 2'-fluoro-cytidine
  modified_base 15: mod_base = OTHER; note = 2'-O-methyl-adenosine
  modified_base 16: mod_base = OTHER; note = 2'-fluoro-uridine
  modified_base 17: mod_base = OTHER; note = 2'-O-methyl-guanosine
  modified_base 18: mod_base = OTHER; note = 2'-O-methyl-adenosine
  modified_base 19: mod_base = OTHER; note = 2'-O-methyl-uridine
  modified_base 20: mod_base = OTHER; note = 2'-O-methyl-adenosine with phosphorothioate linkage
  modified_base 21: mod_base = OTHER; note = 2'-O-methyl-uridine with phosphorothioate linkage
  modified_base 22: mod_base = OTHER; note = 2'-O-methyl-uridine
taggagccctgttcatgatatt

SEQ ID NO: 307 - RNA, 22 nt, synthetic construct
  source 1..22: mol_type = other RNA
  modified_base 1: mod_base = OTHER; note = 2'-O-methyl-uridine with phosphorothioate linkage
  modified_base 2: mod_base = OTHER; note = 2'-fluoro-adenosine with phosphorothioate linkage
  modified_base 3: mod_base = OTHER; note = 2'-fluoro-adenosine
  modified_base 4: mod_base = OTHER; note = 2'-O-methyl-guanosine
  modified_base 5: mod_base = OTHER; note = 2'-fluoro-guanosine
  modified_base 6: mod_base = OTHER; note = 2'-O-methyl-adenosine
  modified_base 7: mod_base = OTHER; note = 2'-fluoro-guanosine
  modified_base 8: mod_base = OTHER; note = 2'-O-methyl-cytidine
  modified_base 9: mod_base = OTHER; note = 2'-O-methyl-cytidine
  modified_base 10: mod_base = OTHER; note = 2'-fluoro-cytidine
  modified_base 11: mod_base = OTHER; note = 2'-O-methyl-uridine
  modified_base 12: mod_base = OTHER; note = 2'-O-methyl-guanosine
  modified_base 13: mod_base = OTHER; note = 2'-O-methyl-uridine
  modified_base 14: mod_base = OTHER; note = 2'-fluoro-uridine
  modified_base 15: mod_base = OTHER; note = 2'-O-methyl-cytidine
  modified_base 16: mod_base = OTHER; note = 2'-fluoro-adenosine
  modified_base 17: mod_base = OTHER; note = 2'-O-methyl-uridine
  modified_base 18: mod_base = OTHER; note = 2'-O-methyl-guanosine
  modified_base 19: mod_base = OTHER; note = 2'-O-methyl-adenosine
  modified_base 20: mod_base = OTHER; note = 2'-O-methyl-uridine with phosphorothioate linkage
  modified_base 21: mod_base = OTHER; note = 2'-O-methyl-adenosine with phosphorothioate linkage
  modified_base 22: mod_base = OTHER; note = 2'-O-methyl-uridine
taaggagccctgttcatgatat

SEQ ID NO: 308 - RNA, 22 nt, synthetic construct
  source 1..22: mol_type = other RNA
  modified_base 1: mod_base = OTHER; note = 2'-O-methyl-uridine with phosphorothioate linkage
  modified_base 2: mod_base = OTHER; note = 2'-fluoro-uridine with phosphorothioate linkage
  modified_base 3: mod_base = OTHER; note = 2'-fluoro-adenosine
  modified_base 4: mod_base = OTHER; note = 2'-O-methyl-adenosine
  modified_base 5: mod_base = OTHER; note = 2'-fluoro-guanosine
  modified_base 6: mod_base = OTHER; note = 2'-O-methyl-guanosine
  modified_base 7: mod_base = OTHER; note = 2'-fluoro-adenosine
  modified_base 8: mod_base = OTHER; note = 2'-O-methyl-guanosine
  modified_base 9: mod_base = OTHER; note = 2'-O-methyl-cytidine
  modified_base 10: mod_base = OTHER; note = 2'-fluoro-cytidine
  modified_base 11: mod_base = OTHER; note = 2'-O-methyl-cytidine
  modified_base 12: mod_base = OTHER; note = 2'-O-methyl-uridine
  modified_base 13: mod_base = OTHER; note = 2'-O-methyl-guanosine
  modified_base 14: mod_base = OTHER; note = 2'-fluoro-uridine
  modified_base 15: mod_base = OTHER; note = 2'-O-methyl-uridine
  modified_base 16: mod_base = OTHER; note = 2'-fluoro-cytidine
  modified_base 17: mod_base = OTHER; note = 2'-O-methyl-adenosine
  modified_base 18: mod_base = OTHER; note = 2'-O-methyl-uridine
  modified_base 19: mod_base = OTHER; note = 2'-O-methyl-guanosine
  modified_base 20: mod_base = OTHER; note = 2'-O-methyl-adenosine with phosphorothioate linkage
  modified_base 21: mod_base = OTHER; note = 2'-O-methyl-uridine with phosphorothioate linkage
  modified_base 22: mod_base = OTHER; note = 2'-O-methyl-adenosine
ttaaggagccctgttcatgata

SEQ ID NO: 309 - RNA, 22 nt, synthetic construct
  source 1..22: mol_type = other RNA
  modified_base 1: mod_base = OTHER; note = 2'-O-methyl-uridine with phosphorothioate linkage
  modified_base 2: mod_base = OTHER; note = 2'-fluoro-adenosine with phosphorothioate linkage
  modified_base 3: mod_base = OTHER; note = 2'-fluoro-uridine
  modified_base 4: mod_base = OTHER; note = 2'-O-methyl-adenosine
  modified_base 5: mod_base = OTHER; note = 2'-fluoro-adenosine
  modified_base 6: mod_base = OTHER; note = 2'-O-methyl-guanosine
  modified_base 7: mod_base = OTHER; note = 2'-fluoro-guanosine
  modified_base 8: mod_base = OTHER; note = 2'-O-methyl-adenosine
  modified_base 9: mod_base = OTHER; note = 2'-O-methyl-guanosine
  modified_base 10: mod_base = OTHER; note = 2'-fluoro-cytidine
  modified_base 11: mod_base = OTHER; note = 2'-O-methyl-cytidine
  modified_base 12: mod_base = OTHER; note = 2'-O-methyl-cytidine
  modified_base 13: mod_base = OTHER; note = 2'-O-methyl-uridine
  modified_base 14: mod_base = OTHER; note = 2'-fluoro-guanosine
  modified_base 15: mod_base = OTHER; note = 2'-O-methyl-uridine
  modified_base 16: mod_base = OTHER; note = 2'-fluoro-uridine
  modified_base 17: mod_base = OTHER; note = 2'-O-methyl-cytidine
  modified_base 18: mod_base = OTHER; note = 2'-O-methyl-adenosine
  modified_base 19: mod_base = OTHER; note = 2'-O-methyl-uridine
  modified_base 20: mod_base = OTHER; note = 2'-O-methyl-guanosine with phosphorothioate linkage
  modified_base 21: mod_base = OTHER; note = 2'-O-methyl-adenosine with phosphorothioate linkage
  modified_base 22: mod_base = OTHER; note = 2'-O-methyl-uridine
tataaggagccctgttcatgat

SEQ ID NO: 310 - RNA, 22 nt, synthetic construct
  source 1..22: mol_type = other RNA
  modified_base 1: mod_base = OTHER; note = 2'-O-methyl-uridine with phosphorothioate linkage
  modified_base 2: mod_base = OTHER; note = 2'-fluoro-uridine with phosphorothioate linkage
  modified_base 3: mod_base = OTHER; note = 2'-fluoro-adenosine
  modified_base 4: mod_base = OTHER; note = 2'-O-methyl-uridine
  modified_base 5: mod_base = OTHER; note = 2'-fluoro-adenosine
  modified_base 6: mod_base = OTHER; note = 2'-O-methyl-adenosine
  modified_base 7: mod_base = OTHER; note = 2'-fluoro-guanosine
  modified_base 8: mod_base = OTHER; note = 2'-O-methyl-guanosine
  modified_base 9: mod_base = OTHER; note = 2'-O-methyl-adenosine
  modified_base 10: mod_base = OTHER; note = 2'-fluoro-guanosine
  modified_base 11: mod_base = OTHER; note = 2'-O-methyl-cytidine
  modified_base 12: mod_base = OTHER; note = 2'-O-methyl-cytidine
  modified_base 13: mod_base = OTHER; note = 2'-O-methyl-cytidine
  modified_base 14: mod_base = OTHER; note = 2'-fluoro-uridine
  modified_base 15: mod_base = OTHER; note = 2'-O-methyl-guanosine
  modified_base 16: mod_base = OTHER; note = 2'-fluoro-uridine
  modified_base 17: mod_base = OTHER; note = 2'-O-methyl-uridine
  modified_base 18: mod_base = OTHER; note = 2'-O-methyl-cytidine
  modified_base 19: mod_base = OTHER; note = 2'-O-methyl-adenosine
  modified_base 20: mod_base = OTHER; note = 2'-O-methyl-uridine with phosphorothioate linkage
  modified_base 21: mod_base = OTHER; note = 2'-O-methyl-guanosine with phosphorothioate linkage
  modified_base 22: mod_base = OTHER; note = 2'-O-methyl-adenosine
ttataaggagccctgttcatga

SEQ ID NO: 311 - RNA, 22 nt, synthetic construct
  source 1..22: mol_type = other RNA
  modified_base 1: mod_base = OTHER; note = 2'-O-methyl-uridine with phosphorothioate linkage
  modified_base 2: mod_base = OTHER; note = 2'-fluoro-adenosine with phosphorothioate linkage
  modified_base 3: mod_base = OTHER; note = 2'-fluoro-uridine
  modified_base 4: mod_base = OTHER; note = 2'-O-methyl-adenosine
  modified_base 5: mod_base = OTHER; note = 2'-fluoro-uridine
  modified_base 6: mod_base = OTHER; note = 2'-O-methyl-adenosine
  modified_base 7: mod_base = OTHER; note = 2'-fluoro-adenosine
  modified_base 8: mod_base = OTHER; note = 2'-O-methyl-guanosine
  modified_base 9: mod_base = OTHER; note = 2'-O-methyl-guanosine
  modified_base 10: mod_base = OTHER; note = 2'-fluoro-adenosine
  modified_base 11: mod_base = OTHER; note = 2'-O-methyl-guanosine
  modified_base 12: mod_base = OTHER; note = 2'-O-methyl-cytidine
  modified_base 13: mod_base = OTHER; note = 2'-O-methyl-cytidine
  modified_base 14: mod_base = OTHER; note = 2'-fluoro-cytidine
  modified_base 15: mod_base = OTHER; note = 2'-O-methyl-uridine
  modified_base 16: mod_base = OTHER; note = 2'-fluoro-guanosine
  modified_base 17: mod_base = OTHER; note = 2'-O-methyl-uridine
  modified_base 18: mod_base = OTHER; note = 2'-O-methyl-uridine
  modified_base 19: mod_base = OTHER; note = 2'-O-methyl-cytidine
  modified_base 20: mod_base = OTHER; note = 2'-O-methyl-adenosine with phosphorothioate linkage
  modified_base 21: mod_base = OTHER; note = 2'-O-methyl-uridine with phosphorothioate linkage
  modified_base 22: mod_base = OTHER; note = 2'-O-methyl-guanosine
tatataaggagccctgttcatg

SEQ ID NO: 312 - RNA, 22 nt, synthetic construct
  source 1..22: mol_type = other RNA
  modified_base 1: mod_base = OTHER; note = 2'-O-methyl-uridine with phosphorothioate linkage
  modified_base 2: mod_base = OTHER; note = 2'-fluoro-cytidine with phosphorothioate linkage
  modified_base 3: mod_base = OTHER; note = 2'-fluoro-adenosine
  modified_base 4: mod_base = OTHER; note = 2'-O-methyl-uridine
  modified_base 5: mod_base = OTHER; note = 2'-fluoro-adenosine
  modified_base 6: mod_base = OTHER; note = 2'-O-methyl-uridine
  modified_base 7: mod_base = OTHER; note = 2'-fluoro-adenosine
  modified_base 8: mod_base = OTHER; note = 2'-O-methyl-adenosine
  modified_base 9: mod_base = OTHER; note = 2'-O-methyl-guanosine
  modified_base 10: mod_base = OTHER; note = 2'-fluoro-guanosine
  modified_base 11: mod_base = OTHER; note = 2'-O-methyl-adenosine
  modified_base 12: mod_base = OTHER; note = 2'-O-methyl-guanosine
  modified_base 13: mod_base = OTHER; note = 2'-O-methyl-cytidine
  modified_base 14: mod_base = OTHER; note = 2'-fluoro-cytidine
  modified_base 15: mod_base = OTHER; note = 2'-O-methyl-cytidine
  modified_base 16: mod_base = OTHER; note = 2'-fluoro-uridine
  modified_base 17: mod_base = OTHER; note = 2'-O-methyl-guanosine
  modified_base 18: mod_base = OTHER; note = 2'-O-methyl-uridine
  modified_base 19: mod_base = OTHER; note = 2'-O-methyl-uridine
  modified_base 20: mod_base = OTHER; note = 2'-O-methyl-cytidine with phosphorothioate linkage
  modified_base 21: mod_base = OTHER; note = 2'-O-methyl-adenosine with phosphorothioate linkage
  modified_base 22: mod_base = OTHER; note = 2'-O-methyl-uridine
tcatataaggagccctgttcat

SEQ ID NO: 313 - RNA, 22 nt, synthetic construct
  source 1..22: mol_type = other RNA
  modified_base 1: mod_base = OTHER; note = 2'-O-methyl-uridine with phosphorothioate linkage
  modified_base 2: mod_base = OTHER; note = 2'-fluoro-guanosine with phosphorothioate linkage
  modified_base 3: mod_base = OTHER; note = 2'-fluoro-uridine
  modified_base 4: mod_base = OTHER; note = 2'-O-methyl-cytidine
  modified_base 5: mod_base = OTHER; note = 2'-fluoro-adenosine
  modified_base 6: mod_base = OTHER; note = 2'-O-methyl-uridine
  modified_base 7: mod_base = OTHER; note = 2'-fluoro-adenosine
  modified_base 8: mod_base = OTHER; note = 2'-O-methyl-uridine
  modified_base 9: mod_base = OTHER; note = 2'-O-methyl-adenosine
  modified_base 10: mod_base = OTHER; note = 2'-fluoro-adenosine
  modified_base 11: mod_base = OTHER; note = 2'-O-methyl-guanosine
  modified_base 12: mod_base = OTHER; note = 2'-O-methyl-guanosine
  modified_base 13: mod_base = OTHER; note = 2'-O-methyl-adenosine
  modified_base 14: mod_base = OTHER; note = 2'-fluoro-guanosine
  modified_base 15: mod_base = OTHER; note = 2'-O-methyl-cytidine
  modified_base 16: mod_base = OTHER; note = 2'-fluoro-cytidine
  modified_base 17: mod_base = OTHER; note = 2'-O-methyl-cytidine
  modified_base 18: mod_base = OTHER; note = 2'-O-methyl-uridine
  modified_base 19: mod_base = OTHER; note = 2'-O-methyl-guanosine
  modified_base 20: mod_base = OTHER; note = 2'-O-methyl-uridine with phosphorothioate linkage
  modified_base 21: mod_base = OTHER; note = 2'-O-methyl-uridine with phosphorothioate linkage
  modified_base 22: mod_base = OTHER; note = 2'-O-methyl-cytidine
tgtcatataaggagccctgttc

SEQ ID NO: 314 - RNA, 22 nt, synthetic construct
  source 1..22: mol_type = other RNA
  modified_base 1: mod_base = OTHER; note = 2'-O-methyl-uridine with phosphorothioate linkage
  modified_base 2: mod_base = OTHER; note = 2'-fluoro-uridine with phosphorothioate linkage
  modified_base 3: mod_base = OTHER; note = 2'-fluoro-adenosine
  modified_base 4: mod_base = OTHER; note = 2'-O-methyl-guanosine
  modified_base 5: mod_base = OTHER; note = 2'-fluoro-uridine
  modified_base 6: mod_base = OTHER; note = 2'-O-methyl-cytidine
  modified_base 7: mod_base = OTHER; note = 2'-fluoro-adenosine
  modified_base 8: mod_base = OTHER; note = 2'-O-methyl-uridine
  modified_base 9: mod_base = OTHER; note = 2'-O-methyl-adenosine
  modified_base 10: mod_base = OTHER; note = 2'-fluoro-uridine
  modified_base 11: mod_base = OTHER; note = 2'-O-methyl-adenosine
  modified_base 12: mod_base = OTHER; note = 2'-O-methyl-adenosine
  modified_base 13: mod_base = OTHER; note = 2'-O-methyl-guanosine
  modified_base 14: mod_base = OTHER; note = 2'-fluoro-guanosine
  modified_base 15: mod_base = OTHER; note = 2'-O-methyl-adenosine
  modified_base 16: mod_base = OTHER; note = 2'-fluoro-guanosine
  modified_base 17: mod_base = OTHER; note = 2'-O-methyl-cytidine
  modified_base 18: mod_base = OTHER; note = 2'-O-methyl-cytidine
  modified_base 19: mod_base = OTHER; note = 2'-O-methyl-cytidine
  modified_base 20: mod_base = OTHER; note = 2'-O-methyl-uridine with phosphorothioate linkage
  modified_base 21: mod_base = OTHER; note = 2'-O-methyl-guanosine with phosphorothioate linkage
  modified_base 22: mod_base = OTHER; note = 2'-O-methyl-uridine
ttagtcatataaggagccctgt

SEQ ID NO: 315 - RNA, 22 nt, synthetic construct
  source 1..22: mol_type = other RNA
  modified_base 1: mod_base = OTHER; note = 2'-O-methyl-uridine with phosphorothioate linkage
  modified_base 2: mod_base = OTHER; note = 2'-fluoro-adenosine with phosphorothioate linkage
  modified_base 3: mod_base = OTHER; note = 2'-fluoro-adenosine
  modified_base 4: mod_base = OTHER; note = 2'-O-methyl-uridine
  modified_base 5: mod_base = OTHER; note = 2'-fluoro-adenosine
  modified_base 6: mod_base = OTHER; note = 2'-O-methyl-guanosine
  modified_base 7: mod_base = OTHER; note = 2'-fluoro-uridine
  modified_base 8: mod_base = OTHER; note = 2'-O-methyl-cytidine
  modified_base 9: mod_base = OTHER; note = 2'-O-methyl-adenosine
  modified_base 10: mod_base = OTHER; note = 2'-fluoro-uridine
  modified_base 11: mod_base = OTHER; note = 2'-O-methyl-adenosine
  modified_base 12: mod_base = OTHER; note = 2'-O-methyl-uridine
  modified_base 13: mod_base = OTHER; note = 2'-O-methyl-adenosine
  modified_base 14: mod_base = OTHER; note = 2'-fluoro-adenosine
  modified_base 15: mod_base = OTHER; note = 2'-O-methyl-guanosine
  modified_base 16: mod_base = OTHER; note = 2'-fluoro-guanosine
  modified_base 17: mod_base = OTHER; note = 2'-O-methyl-adenosine
  modified_base 18: mod_base = OTHER; note = 2'-O-methyl-guanosine
  modified_base 19: mod_base = OTHER; note = 2'-O-methyl-cytidine
  modified_base 20: mod_base = OTHER; note = 2'-O-methyl-cytidine with phosphorothioate linkage
  modified_base 21: mod_base = OTHER; note = 2'-O-methyl-cytidine with phosphorothioate linkage
  modified_base 22: mod_base = OTHER; note = 2'-O-methyl-uridine
taatagtcatataaggagccct

SEQ ID NO: 316 - RNA, 22 nt, synthetic construct
  source 1..22: mol_type = other RNA
  modified_base 1: mod_base = OTHER; note = 2'-O-methyl-uridine with phosphorothioate linkage
  modified_base 2: mod_base = OTHER; note = 2'-fluoro-cytidine with phosphorothioate linkage
  modified_base 3: mod_base = OTHER; note = 2'-fluoro-adenosine
  modified_base 4: mod_base = OTHER; note = 2'-O-methyl-adenosine
  modified_base 5: mod_base = OTHER; note = 2'-fluoro-adenosine
  modified_base 6: mod_base = OTHER; note = 2'-O-methyl-uridine
  modified_base 7: mod_base = OTHER; note = 2'-fluoro-adenosine
  modified_base 8: mod_base = OTHER; note = 2'-O-methyl-guanosine
  modified_base 9: mod_base = OTHER; note = 2'-O-methyl-uridine
  modified_base 10: mod_base = OTHER; note = 2'-fluoro-cytidine
  modified_base 11: mod_base = OTHER; note = 2'-O-methyl-adenosine
  modified_base 12: mod_base = OTHER; note = 2'-O-methyl-uridine
  modified_base 13: mod_base = OTHER; note = 2'-O-methyl-adenosine
  modified_base 14: mod_base = OTHER; note = 2'-fluoro-uridine
  modified_base 15: mod_base = OTHER; note = 2'-O-methyl-adenosine
  modified_base 16: mod_base = OTHER; note = 2'-fluoro-adenosine
  modified_base 17: mod_base = OTHER; note = 2'-O-methyl-guanosine
  modified_base 18: mod_base = OTHER; note = 2'-O-methyl-guanosine
  modified_base 19: mod_base = OTHER; note = 2'-O-methyl-adenosine
  modified_base 20: mod_base = OTHER; note = 2'-O-methyl-guanosine with phosphorothioate linkage
  modified_base 21: mod_base = OTHER; note = 2'-O-methyl-cytidine with phosphorothioate linkage
  modified_base 22: mod_base = OTHER; note = 2'-O-methyl-cytidine
tcaaatagtcatataaggagcc

SEQ ID NO: 317 - RNA, 22 nt, synthetic construct
  source 1..22: mol_type = other RNA
  modified_base 1: mod_base = OTHER; note = 2'-O-methyl-uridine with phosphorothioate linkage
  modified_base 2: mod_base = OTHER; note = 2'-fluoro-uridine with phosphorothioate linkage
  modified_base 3: mod_base = OTHER; note = 2'-fluoro-uridine
  modified_base 4: mod_base = OTHER; note = 2'-O-methyl-cytidine
  modified_base 5: mod_base = OTHER; note = 2'-fluoro-cytidine
  modified_base 6: mod_base = OTHER; note = 2'-O-methyl-adenosine
  modified_base 7: mod_base = OTHER; note = 2'-fluoro-uridine
  modified_base 8: mod_base = OTHER; note = 2'-O-methyl-uridine
  modified_base 9: mod_base = OTHER; note = 2'-O-methyl-adenosine
  modified_base 10: mod_base = OTHER; note = 2'-fluoro-uridine
  modified_base 11: mod_base = OTHER; note = 2'-O-methyl-cytidine
  modified_base 12: mod_base = OTHER; note = 2'-O-methyl-uridine
  modified_base 13: mod_base = OTHER; note = 2'-O-methyl-uridine
  modified_base 14: mod_base = OTHER; note = 2'-fluoro-uridine
  modified_base 15: mod_base = OTHER; note = 2'-O-methyl-guanosine
  modified_base 16: mod_base = OTHER; note = 2'-fluoro-uridine
  modified_base 17: mod_base = OTHER; note = 2'-O-methyl-uridine
  modified_base 18: mod_base = OTHER; note = 2'-O-methyl-guanosine
  modified_base 19: mod_base = OTHER; note = 2'-O-methyl-uridine
  modified_base 20: mod_base = OTHER; note = 2'-O-methyl-cytidine with phosphorothioate linkage
  modified_base 21: mod_base = OTHER; note = 2'-O-methyl-adenosine with phosphorothioate linkage
  modified_base 22: mod_base = OTHER; note = 2'-O-methyl-guanosine
tttccattatctttgttgtcag

SEQ ID NO: 318 - RNA, 22 nt, synthetic construct
  source 1..22: mol_type = other RNA
  modified_base 1: mod_base = OTHER; note = 2'-O-methyl-uridine with phosphorothioate linkage
  modified_base 2: mod_base = OTHER; note = 2'-fluoro-adenosine with phosphorothioate linkage
  modified_base 3: mod_base = OTHER; note = 2'-fluoro-uridine
  modified_base 4: mod_base = OTHER; note = 2'-O-methyl-uridine
  modified_base 5: mod_base = OTHER; note = 2'-fluoro-cytidine
  modified_base 6: mod_base = OTHER; note = 2'-O-methyl-uridine
  modified_base 7: mod_base = OTHER; note = 2'-fluoro-adenosine
  modified_base 8: mod_base = OTHER; note = 2'-O-methyl-guanosine
  modified_base 9: mod_base = OTHER; note = 2'-O-methyl-adenosine
  modified_base 10: mod_base = OTHER; note = 2'-fluoro-uridine
  modified_base 11: mod_base = OTHER; note = 2'-O-methyl-guanosine
  modified_base 12: mod_base = OTHER; note = 2'-O-methyl-uridine
  modified_base 13: mod_base = OTHER; note = 2'-O-methyl-guanosine
  modified_base 14: mod_base = OTHER; note = 2'-fluoro-adenosine
  modified_base 15: mod_base = OTHER; note = 2'-O-methyl-cytidine
  modified_base 16: mod_base = OTHER; note = 2'-fluoro-adenosine
  modified_base 17: mod_base = OTHER; note = 2'-O-methyl-uridine
  modified_base 18: mod_base = OTHER; note = 2'-O-methyl-guanosine
  modified_base 19: mod_base = OTHER; note = 2'-O-methyl-cytidine
  modified_base 20: mod_base = OTHER; note = 2'-O-methyl-cytidine with phosphorothioate linkage
  modified_base 21: mod_base = OTHER; note = 2'-O-methyl-adenosine with phosphorothioate linkage
  modified_base 22: mod_base = OTHER; note = 2'-O-methyl-adenosine
tattctagatgtgacatgccaa

SEQ ID NO: 319 - RNA, 22 nt, synthetic construct
  source 1..22: mol_type = other RNA
  modified_base 1: mod_base = OTHER; note = 2'-O-methyl-uridine with phosphorothioate linkage
  modified_base 2: mod_base = OTHER; note = 2'-fluoro-adenosine with phosphorothioate linkage
  modified_base 3: mod_base = OTHER; note = 2'-fluoro-adenosine
  modified_base 4: mod_base = OTHER; note = 2'-O-methyl-uridine
  modified_base 5: mod_base = OTHER; note = 2'-fluoro-uridine
  modified_base 6: mod_base = OTHER; note = 2'-O-methyl-cytidine
  modified_base 7: mod_base = OTHER; note = 2'-fluoro-uridine
  modified_base 8: mod_base = OTHER; note = 2'-O-methyl-adenosine
  modified_base 9: mod_base = OTHER; note = 2'-O-methyl-guanosine
  modified_base 10: mod_base = OTHER; note = 2'-fluoro-adenosine
  modified_base 11: mod_base = OTHER; note = 2'-O-methyl-uridine
  modified_base 12: mod_base = OTHER; note = 2'-O-methyl-guanosine
  modified_base 13: mod_base = OTHER; note = 2'-O-methyl-uridine
  modified_base 14: mod_base = OTHER; note = 2'-fluoro-guanosine
  modified_base 15: mod_base = OTHER; note = 2'-O-methyl-adenosine
  modified_base 16: mod_base = OTHER; note = 2'-fluoro-cytidine
  modified_base 17: mod_base = OTHER; note = 2'-O-methyl-adenosine
  modified_base 18: mod_base = OTHER; note = 2'-O-methyl-uridine
  modified_base 19: mod_base = OTHER; note = 2'-O-methyl-guanosine
  modified_base 20: mod_base = OTHER; note = 2'-O-methyl-cytidine with phosphorothioate linkage
  modified_base 21: mod_base = OTHER; note = 2'-O-methyl-cytidine with phosphorothioate linkage
  modified_base 22: mod_base = OTHER; note = 2'-O-methyl-adenosine
taattctagatgtgacatgcca

SEQ ID NO: 320 - RNA, 22 nt, synthetic construct
  source 1..22: mol_type = other RNA
  modified_base 1: mod_base = OTHER; note = 2'-O-methyl-uridine with phosphorothioate linkage
  modified_base 2: mod_base = OTHER; note = 2'-fluoro-uridine with phosphorothioate linkage
  modified_base 3: mod_base = OTHER; note = 2'-fluoro-uridine
  modified_base 4: mod_base = OTHER; note = 2'-O-methyl-cytidine
  modified_base 5: mod_base = OTHER; note = 2'-fluoro-uridine
  modified_base 6: mod_base = OTHER; note = 2'-O-methyl-uridine
  modified_base 7: mod_base = OTHER; note = 2'-fluoro-adenosine
  modified_base 8: mod_base = OTHER; note = 2'-O-methyl-guanosine
  modified_base 9: mod_base = OTHER; note = 2'-O-methyl-guanosine
  modified_base 10: mod_base = OTHER; note = 2'-fluoro-uridine
  modified_base 11: mod_base = OTHER; note = 2'-O-methyl-adenosine
  modified_base 12: mod_base = OTHER; note = 2'-O-methyl-uridine
  modified_base 13: mod_base = OTHER; note = 2'-O-methyl-adenosine
  modified_base 14: mod_base = OTHER; note = 2'-fluoro-adenosine
  modified_base 15: mod_base = OTHER; note = 2'-O-methyl-guanosine
  modified_base 16: mod_base = OTHER; note = 2'-fluoro-adenosine
  modified_base 17: mod_base = OTHER; note = 2'-O-methyl-adenosine
  modified_base 18: mod_base = OTHER; note = 2'-O-methyl-guanosine
  modified_base 19: mod_base = OTHER; note = 2'-O-methyl-adenosine
  modified_base 20: mod_base = OTHER; note = 2'-O-methyl-guanosine with phosphorothioate linkage
  modified_base 21: mod_base = OTHER; note = 2'-O-methyl-uridine with phosphorothioate linkage
  modified_base 22: mod_base = OTHER; note = 2'-O-methyl-cytidine
tttcttaggtataagaagagtc

SEQ ID NO: 321 - RNA, 22 nt, synthetic construct
  source 1..22: mol_type = other RNA
  modified_base 1: mod_base = OTHER; note = 2'-O-methyl-uridine with phosphorothioate linkage
  modified_base 2: mod_base = OTHER; note = 2'-fluoro-uridine with phosphorothioate linkage
  modified_base 3: mod_base = OTHER; note = 2'-fluoro-guanosine
  modified_base 4: mod_base = OTHER; note = 2'-O-methyl-uridine
  modified_base 5: mod_base = OTHER; note = 2'-fluoro-uridine
  modified_base 6: mod_base = OTHER; note = 2'-O-methyl-cytidine
  modified_base 7: mod_base = OTHER; note = 2'-fluoro-uridine
  modified_base 8: mod_base = OTHER; note = 2'-O-methyl-uridine
  modified_base 9: mod_base = OTHER; note = 2'-O-methyl-adenosine
  modified_base 10: mod_base = OTHER; note = 2'-fluoro-guanosine
  modified_base 11: mod_base = OTHER; note = 2'-O-methyl-guanosine
  modified_base 12: mod_base = OTHER; note = 2'-O-methyl-uridine
  modified_base 13: mod_base = OTHER; note = 2'-O-methyl-adenosine
  modified_base 14: mod_base = OTHER; note = 2'-fluoro-uridine
  modified_base 15: mod_base = OTHER; note = 2'-O-methyl-adenosine
  modified_base 16: mod_base = OTHER; note = 2'-fluoro-adenosine
  modified_base 17: mod_base = OTHER; note = 2'-O-methyl-guanosine
  modified_base 18: mod_base = OTHER; note = 2'-O-methyl-adenosine
  modified_base 19: mod_base = OTHER; note = 2'-O-methyl-adenosine
  modified_base 20: mod_base = OTHER; note = 2'-O-methyl-guanosine with phosphorothioate linkage
  modified_base 21: mod_base = OTHER; note = 2'-O-methyl-adenosine with phosphorothioate linkage
  modified_base 22: mod_base = OTHER; note = 2'-O-methyl-guanosine
ttgttcttaggtataagaagag

SEQ ID NO: 322 - RNA, 22 nt, synthetic construct
  source 1..22: mol_type = other RNA
  modified_base 1: mod_base = OTHER; note = 2'-O-methyl-uridine with phosphorothioate linkage
  modified_base 2: mod_base = OTHER; note = 2'-fluoro-uridine with phosphorothioate linkage
  modified_base 3: mod_base = OTHER; note = 2'-fluoro-uridine
  modified_base 4: mod_base = OTHER; note = 2'-O-methyl-uridine
  modified_base 5: mod_base = OTHER; note = 2'-fluoro-guanosine
  modified_base 6: mod_base = OTHER; note = 2'-O-methyl-adenosine
  modified_base 7: mod_base = OTHER; note = 2'-fluoro-adenosine
  modified_base 8: mod_base = OTHER; note = 2'-O-methyl-guanosine
  modified_base 9: mod_base = OTHER; note = 2'-O-methyl-uridine
  modified_base 10: mod_base = OTHER; note = 2'-fluoro-guanosine
  modified_base 11: mod_base = OTHER; note = 2'-O-methyl-cytidine
  modified_base 12: mod_base = OTHER; note = 2'-O-methyl-guanosine
  modified_base 13: mod_base = OTHER; note = 2'-O-methyl-cytidine
  modified_base 14: mod_base = OTHER; note = 2'-fluoro-guanosine
  modified_base 15: mod_base = OTHER; note = 2'-O-methyl-guanosine
  modified_base 16: mod_base = OTHER; note = 2'-fluoro-uridine
  modified_base 17: mod_base = OTHER; note = 2'-O-methyl-uridine
  modified_base 18: mod_base = OTHER; note = 2'-O-methyl-guanosine
  modified_base 19: mod_base = OTHER; note = 2'-O-methyl-guanosine
  modified_base 20: mod_base = OTHER; note = 2'-O-methyl-cytidine with phosphorothioate linkage
  modified_base 21: mod_base = OTHER; note = 2'-O-methyl-uridine with phosphorothioate linkage
  modified_base 22: mod_base = OTHER; note = 2'-O-methyl-cytidine
ttttgaagtgcgcggttggctc

SEQ ID NO: 323 - RNA, 22 nt, synthetic construct
  source 1..22: mol_type = other RNA
  modified_base 1: mod_base = OTHER; note = 2'-O-methyl-uridine with phosphorothioate linkage
  modified_base 2: mod_base = OTHER; note = 2'-fluoro-uridine with phosphorothioate linkage
  modified_base 3: mod_base = OTHER; note = 2'-fluoro-uridine
  modified_base 4: mod_base = OTHER; note = 2'-O-methyl-uridine
  modified_base 5: mod_base = OTHER; note = 2'-fluoro-uridine
  modified_base 6: mod_base = OTHER; note = 2'-O-methyl-guanosine
  modified_base 7: mod_base = OTHER; note = 2'-fluoro-adenosine
  modified_base 8: mod_base = OTHER; note = 2'-O-methyl-adenosine
  modified_base 9: mod_base = OTHER; note = 2'-O-methyl-guanosine
  modified_base 10: mod_base = OTHER; note = 2'-fluoro-uridine
  modified_base 11: mod_base = OTHER; note = 2'-O-methyl-guanosine
  modified_base 12: mod_base = OTHER; note = 2'-O-methyl-cytidine
  modified_base 13: mod_base = OTHER; note = 2'-O-methyl-guanosine
  modified_base 14: mod_base = OTHER; note = 2'-fluoro-cytidine
  modified_base 15: mod_base = OTHER; note = 2'-O-methyl-guanosine
  modified_base 16: mod_base = OTHER; note = 2'-fluoro-guanosine
  modified_base 17: mod_base = OTHER; note = 2'-O-methyl-uridine
  modified_base 18: mod_base = OTHER; note = 2'-O-methyl-uridine
  modified_base 19: mod_base = OTHER; note = 2'-O-methyl-guanosine
  modified_base 20: mod_base = OTHER; note = 2'-O-methyl-guanosine with phosphorothioate linkage
  modified_base 21: mod_base = OTHER; note = 2'-O-methyl-cytidine with phosphorothioate linkage
  modified_base 22: mod_base = OTHER; note = 2'-O-methyl-uridine
tttttgaagtgcgcggttggct

SEQ ID NO: 324 - RNA, 22 nt, synthetic construct
  source 1..22: mol_type = other RNA
  modified_base 1: mod_base = OTHER; note = 2'-O-methyl-uridine with phosphorothioate linkage
  modified_base 2: mod_base = OTHER; note = 2'-fluoro-adenosine with phosphorothioate linkage
  modified_base 3: mod_base = OTHER; note = 2'-fluoro-cytidine
  modified_base 4: mod_base = OTHER; note = 2'-O-methyl-adenosine
  modified_base 5: mod_base = OTHER; note = 2'-fluoro-cytidine
  modified_base 6: mod_base = OTHER; note = 2'-O-methyl-adenosine
  modified_base 7: mod_base = OTHER; note = 2'-fluoro-adenosine
  modified_base 8: mod_base = OTHER; note = 2'-O-methyl-adenosine
  modified_base 9: mod_base = OTHER; note = 2'-O-methyl-adenosine
  modified_base 10: mod_base = OTHER; note = 2'-fluoro-guanosine
  modified_base 11: mod_base = OTHER; note = 2'-O-methyl-adenosine
  modified_base 12: mod_base = OTHER; note = 2'-O-methyl-cytidine
  modified_base 13: mod_base = OTHER; note = 2'-O-methyl-adenosine
  modified_base 14: mod_base = OTHER; note = 2'-fluoro-uridine
  modified_base 15: mod_base = OTHER; note = 2'-O-methyl-adenosine
  modified_base 16: mod_base = OTHER; note = 2'-fluoro-cytidine
  modified_base 17: mod_base = OTHER; note = 2'-O-methyl-adenosine
  modified_base 18: mod_base = OTHER; note = 2'-O-methyl-cytidine
  modified_base 19: mod_base = OTHER; note = 2'-O-methyl-adenosine
  modified_base 20: mod_base = OTHER; note = 2'-O-methyl-cytidine with phosphorothioate linkage
  modified_base 21: mod_base = OTHER; note = 2'-O-methyl-uridine with phosphorothioate linkage
  modified_base 22: mod_base = OTHER; note = 2'-O-methyl-uridine
tacacaaaagacatacacactt

SEQ ID NO: 325 - RNA, 22 nt, synthetic construct
  source 1..22: mol_type = other RNA
  modified_base 1: mod_base = OTHER; note = 2'-O-methyl-uridine with phosphorothioate linkage
  modified_base 2: mod_base = OTHER; note = 2'-fluoro-adenosine with phosphorothioate linkage
  modified_base 3: mod_base = OTHER; note = 2'-fluoro-adenosine
  modified_base 4: mod_base = OTHER; note = 2'-O-methyl-uridine
  modified_base 5: mod_base = OTHER; note = 2'-fluoro-cytidine
  modified_base 6: mod_base = OTHER; note = 2'-O-methyl-adenosine
  modified_base 7: mod_base = OTHER; note = 2'-fluoro-cytidine
  modified_base 8: mod_base = OTHER; note = 2'-O-methyl-adenosine
  modified_base 9: mod_base = OTHER; note = 2'-O-methyl-cytidine
  modified_base 10: mod_base = OTHER; note = 2'-fluoro-adenosine
  modified_base 11: mod_base = OTHER; note = 2'-O-methyl-adenosine
  modified_base 12: mod_base = OTHER; note = 2'-O-methyl-adenosine
  modified_base 13: mod_base = OTHER; note = 2'-O-methyl-adenosine
  modified_base 14: mod_base = OTHER; note = 2'-fluoro-guanosine
  modified_base 15: mod_base = OTHER; note = 2'-O-methyl-adenosine
  modified_base 16: mod_base = OTHER; note = 2'-fluoro-cytidine
  modified_base 17: mod_base = OTHER; note = 2'-O-methyl-adenosine
  modified_base 18: mod_base = OTHER; note = 2'-O-methyl-uridine
  modified_base 19: mod_base = OTHER; note = 2'-O-methyl-adenosine
  modified_base 20: mod_base = OTHER; note = 2'-O-methyl-cytidine with phosphorothioate linkage
  modified_base 21: mod_base = OTHER; note = 2'-O-methyl-adenosine with phosphorothioate linkage
  modified_base 22: mod_base = OTHER; note = 2'-O-methyl-cytidine
taatcacacaaaagacatacac

SEQ ID NO: 326 - RNA, 22 nt, synthetic construct
  source 1..22: mol_type = other RNA
  modified_base 1: mod_base = OTHER; note = 2'-O-methyl-uridine with phosphorothioate linkage
  modified_base 2: mod_base = OTHER; note = 2'-fluoro-uridine with phosphorothioate linkage
  modified_base 3: mod_base = OTHER; note = 2'-fluoro-uridine
  modified_base 4: mod_base = OTHER; note = 2'-O-methyl-guanosine
  modified_base 5: mod_base = OTHER; note = 2'-fluoro-adenosine
  modified_base 6: mod_base = OTHER; note = 2'-O-methyl-adenosine
  modified_base 7: mod_base = OTHER; note = 2'-fluoro-guanosine
  modified_base 8: mod_base = OTHER; note = 2'-O-methyl-adenosine
  modified_base 9: mod_base = OTHER; note = 2'-O-methyl-adenosine
  modified_base 10: mod_base = OTHER; note = 2'-fluoro-uridine
  modified_base 11: mod_base = OTHER; note = 2'-O-methyl-cytidine
  modified_base 12: mod_base = OTHER; note = 2'-O-methyl-adenosine
  modified_base 13: mod_base = OTHER; note = 2'-O-methyl-cytidine
  modified_base 14: mod_base = OTHER; note = 2'-fluoro-adenosine
  modified_base 15: mod_base = OTHER; note = 2'-O-methyl-cytidine
  modified_base 16: mod_base = OTHER; note = 2'-fluoro-adenosine
  modified_base 17: mod_base = OTHER; note = 2'-O-methyl-adenosine
  modified_base 18: mod_base = OTHER; note = 2'-O-methyl-adenosine
  modified_base 19: mod_base = OTHER; note = 2'-O-methyl-adenosine
  modified_base 20: mod_base = OTHER; note = 2'-O-methyl-guanosine with phosphorothioate linkage
  modified_base 21: mod_base = OTHER; note = 2'-O-methyl-adenosine with phosphorothioate linkage
  modified_base 22: mod_base = OTHER; note = 2'-O-methyl-cytidine
tttgaagaatcacacaaaagac

SEQ ID NO: 327 - RNA, 22 nt, synthetic construct
  source 1..22: mol_type = other RNA
  modified_base 1: mod_base = OTHER; note = 2'-O-methyl-uridine with phosphorothioate linkage
  modified_base 2: mod_base = OTHER; note = 2'-fluoro-uridine with phosphorothioate linkage
  modified_base 3: mod_base = OTHER; note = 2'-fluoro-uridine
  modified_base 4: mod_base = OTHER; note = 2'-O-methyl-guanosine
  modified_base 5: mod_base = OTHER; note = 2'-fluoro-guanosine
  modified_base 6: mod_base = OTHER; note = 2'-O-methyl-uridine
  modified_base 7: mod_base = OTHER; note = 2'-fluoro-uridine
  modified_base 8: mod_base = OTHER; note = 2'-O-methyl-adenosine
  modified_base 9: mod_base = OTHER; note = 2'-O-methyl-guanosine
  modified_base 10: mod_base = OTHER; note = 2'-fluoro-cytidine
  modified_base 11: mod_base = OTHER; note = 2'-O-methyl-adenosine
  modified_base 12: mod_base = OTHER; note = 2'-O-methyl-uridine
  modified_base 13: mod_base = OTHER; note = 2'-O-methyl-guanosine
  modified_base 14: mod_base = OTHER; note = 2'-fluoro-adenosine
  modified_base 15: mod_base = OTHER; note = 2'-O-methyl-cytidine
  modified_base 16: mod_base = OTHER; note = 2'-fluoro-uridine
  modified_base 17: mod_base = OTHER; note = 2'-O-methyl-guanosine
  modified_base 18: mod_base = OTHER; note = 2'-O-methyl-adenosine
  modified_base 19: mod_base = OTHER; note = 2'-O-methyl-uridine
  modified_base 20: mod_base = OTHER; note = 2'-O-methyl-guanosine with phosphorothioate linkage
  modified_base 21: mod_base = OTHER; note = 2'-O-methyl-cytidine with phosphorothioate linkage
  modified_base 22: mod_base = OTHER; note = 2'-O-methyl-cytidine
tttggttagcatgactgatgcc

SEQ ID NO: 328 - RNA, 22 nt, synthetic construct
  source 1..22: mol_type = other RNA
  modified_base 1: mod_base = OTHER; note = 2'-O-methyl-uridine with phosphorothioate linkage
  modified_base 2: mod_base = OTHER; note = 2'-fluoro-adenosine with phosphorothioate linkage
  modified_base 3: mod_base = OTHER; note = 2'-fluoro-uridine
  modified_base 4: mod_base = OTHER; note = 2'-O-methyl-uridine
  modified_base 5: mod_base = OTHER; note = 2'-fluoro-cytidine
  modified_base 6: mod_base = OTHER; note = 2'-O-methyl-adenosine
  modified_base 7: mod_base = OTHER; note = 2'-fluoro-guanosine
  modified_base 8: mod_base = OTHER; note = 2'-O-methyl-uridine
  modified_base 9: mod_base = OTHER; note = 2'-O-methyl-uridine
  modified_base 10: mod_base = OTHER; note = 2'-fluoro-cytidine
  modified_base 11: mod_base = OTHER; note = 2'-O-methyl-uridine
  modified_base 12: mod_base = OTHER; note = 2'-O-methyl-guanosine
  modified_base 13: mod_base = OTHER; note = 2'-O-methyl-guanosine
  modified_base 14: mod_base = OTHER; note = 2'-fluoro-adenosine
  modified_base 15: mod_base = OTHER; note = 2'-O-methyl-adenosine
  modified_base 16: mod_base = OTHER; note = 2'-fluoro-guanosine
  modified_base 17: mod_base = OTHER; note = 2'-O-methyl-guanosine
  modified_base 18: mod_base = OTHER; note = 2'-O-methyl-guanosine
  modified_base 19: mod_base = OTHER; note = 2'-O-methyl-adenosine
  modified_base 20: mod_base = OTHER; note = 2'-O-methyl-guanosine with phosphorothioate linkage
  modified_base 21: mod_base = OTHER; note = 2'-O-methyl-adenosine with phosphorothioate linkage
  modified_base 22: mod_base = OTHER; note = 2'-O-methyl-cytidine
tattcagttctggaagggagac

SEQ ID NO: 329 - RNA, 22 nt, synthetic construct
  source 1..22: mol_type = other RNA
  modified_base 1: mod_base = OTHER; note = 2'-O-methyl-uridine with phosphorothioate linkage
  modified_base 2: mod_base = OTHER; note = 2'-fluoro-uridine with phosphorothioate linkage
  modified_base 3: mod_base = OTHER; note = 2'-fluoro-uridine
  modified_base 4: mod_base = OTHER; note = 2'-O-methyl-guanosine
  modified_base 5: mod_base = OTHER; note = 2'-fluoro-cytidine
  modified_base 6: mod_base = OTHER; note = 2'-O-methyl-adenosine
  modified_base 7: mod_base = OTHER; note = 2'-fluoro-adenosine
  modified_base 8: mod_base = OTHER; note = 2'-O-methyl-adenosine
  modified_base 9: mod_base = OTHER; note = 2'-O-methyl-adenosine
  modified_base 10: mod_base = OTHER; note = 2'-fluoro-adenosine
  modified_base 11: mod_base = OTHER; note = 2'-O-methyl-uridine
  modified_base 12: mod_base = OTHER; note = 2'-O-methyl-cytidine
  modified_base 13: mod_base = OTHER; note = 2'-O-methyl-uridine
  modified_base 14: mod_base = OTHER; note = 2'-fluoro-guanosine
  modified_base 15: mod_base = OTHER; note = 2'-O-methyl-uridine
  modified_base 16: mod_base = OTHER; note = 2'-fluoro-guanosine
  modified_base 17: mod_base = OTHER; note = 2'-O-methyl-adenosine
  modified_base 18: mod_base = OTHER; note = 2'-O-methyl-adenosine
  modified_base 19: mod_base = OTHER; note = 2'-O-methyl-guanosine
  modified_base 20: mod_base = OTHER; note = 2'-O-methyl-cytidine with phosphorothioate linkage
  modified_base 21: mod_base = OTHER; note = 2'-O-methyl-adenosine with phosphorothioate linkage
  modified_base 22: mod_base = OTHER; note = 2'-O-methyl-guanosine
tttgcaaaaatctgtgaagcag

SEQ ID NO: 330 - RNA, 22 nt, synthetic construct
  source 1..22: mol_type = other RNA
  modified_base 1: mod_base = OTHER; note = 2'-O-methyl-uridine with phosphorothioate linkage
  modified_base 2: mod_base = OTHER; note = 2'-fluoro-adenosine with phosphorothioate linkage
  modified_base 3: mod_base = OTHER; note = 2'-fluoro-uridine
  modified_base 4: mod_base = OTHER; note = 2'-O-methyl-guanosine
  modified_base 5: mod_base = OTHER; note = 2'-fluoro-uridine
  modified_base 6: mod_base = OTHER; note = 2'-O-methyl-uridine
  modified_base 7: mod_base = OTHER; note = 2'-fluoro-guanosine
  modified_base 8: mod_base = OTHER; note = 2'-O-methyl-uridine
  modified_base 9: mod_base = OTHER; note = 2'-O-methyl-uridine
  modified_base 10: mod_base = OTHER; note = 2'-fluoro-guanosine
  modified_base 11: mod_base = OTHER; note = 2'-O-methyl-cytidine
  modified_base 12: mod_base = OTHER; note = 2'-O-methyl-adenosine
  modified_base 13: mod_base = OTHER; note = 2'-O-methyl-adenosine
  modified_base 14: mod_base = OTHER; note = 2'-fluoro-adenosine
  modified_base 15: mod_base = OTHER; note = 2'-O-methyl-adenosine
  modified_base 16: mod_base = OTHER; note = 2'-fluoro-adenosine
  modified_base 17: mod_base = OTHER; note = 2'-O-methyl-uridine
  modified_base 18: mod_base = OTHER; note = 2'-O-methyl-cytidine
  modified_base 19: mod_base = OTHER; note = 2'-O-methyl-uridine
  modified_base 20: mod_base = OTHER; note = 2'-O-methyl-guanosine with phosphorothioate linkage
  modified_base 21: mod_base = OTHER; note = 2'-O-methyl-uridine with phosphorothioate linkage
  modified_base 22: mod_base = OTHER; note = 2'-O-methyl-guanosine
tatgttgttgcaaaaatctgtg

SEQ ID NO: 331 - RNA, 22 nt, synthetic construct
  source 1..22: mol_type = other RNA
  modified_base 1: mod_base = OTHER; note = 2'-O-methyl-uridine with phosphorothioate linkage
  modified_base 2: mod_base = OTHER; note = 2'-fluoro-adenosine with phosphorothioate linkage
  modified_base 3: mod_base = OTHER; note = 2'-fluoro-adenosine
  modified_base 4: mod_base = OTHER; note = 2'-O-methyl-uridine
  modified_base 5: mod_base = OTHER; note = 2'-fluoro-guanosine
  modified_base 6: mod_base = OTHER; note = 2'-O-methyl-adenosine
  modified_base 7: mod_base = OTHER; note = 2'-fluoro-uridine
  modified_base 8: mod_base = OTHER; note = 2'-O-methyl-guanosine
  modified_base 9: mod_base = OTHER; note = 2'-O-methyl-guanosine
  modified_base 10: mod_base = OTHER; note = 2'-fluoro-cytidine
  modified_base 11: mod_base = OTHER; note = 2'-O-methyl-cytidine
  modified_base 12: mod_base = OTHER; note = 2'-O-methyl-adenosine
  modified_base 13: mod_base = OTHER; note = 2'-O-methyl-guanosine
  modified_base 14: mod_base = OTHER; note = 2'-fluoro-cytidine
  modified_base 15: mod_base = OTHER; note = 2'-O-methyl-uridine
  modified_base 16: mod_base = OTHER; note = 2'-fluoro-cytidine
  modified_base 17: mod_base = OTHER; note = 2'-O-methyl-cytidine
  modified_base 18: mod_base = OTHER; note = 2'-O-methyl-adenosine
  modified_base 19: mod_base = OTHER; note = 2'-O-methyl-uridine
  modified_base 20: mod_base = OTHER; note = 2'-O-methyl-guanosine with phosphorothioate linkage
  modified_base 21: mod_base = OTHER; note = 2'-O-methyl-guanosine with phosphorothioate linkage
  modified_base 22: mod_base = OTHER; note = 2'-O-methyl-guanosine
taatgatggccagctccatggg

SEQ ID NO: 332 - RNA, 22 nt, synthetic construct
  source 1..22: mol_type = other RNA
  modified_base 1: mod_base = OTHER; note = 2'-O-methyl-uridine with phosphorothioate linkage
  modified_base 2: mod_base = OTHER; note = 2'-fluoro-adenosine with phosphorothioate linkage
  modified_base 3: mod_base = OTHER; note = 2'-fluoro-adenosine
  modified_base 4: mod_base = OTHER; note = 2'-O-methyl-uridine
  modified_base 5: mod_base = OTHER; note = 2'-fluoro-adenosine
  modified_base 6: mod_base = OTHER; note = 2'-O-methyl-adenosine
  modified_base 7: mod_base = OTHER; note = 2'-fluoro-uridine
  modified_base 8: mod_base = OTHER; note = 2'-O-methyl-guanosine
  modified_base 9: mod_base = OTHER; note = 2'-O-methyl-adenosine
  modified_base 10: mod_base = OTHER; note = 2'-fluoro-uridine
  modified_base 11: mod_base = OTHER; note = 2'-O-methyl-guanosine
  modified_base 12: mod_base = OTHER; note = 2'-O-methyl-guanosine
  modified_base 13: mod_base = OTHER; note = 2'-O-methyl-cytidine
  modified_base 14: mod_base = OTHER; note = 2'-fluoro-cytidine
  modified_base 15: mod_base = OTHER; note = 2'-O-methyl-adenosine
  modified_base 16: mod_base = OTHER; note = 2'-fluoro-guanosine
  modified_base 17: mod_base = OTHER; note = 2'-O-methyl-cytidine
  modified_base 18: mod_base = OTHER; note = 2'-O-methyl-uridine
  modified_base 19: mod_base = OTHER; note = 2'-O-methyl-cytidine
  modified_base 20: mod_base = OTHER; note = 2'-O-methyl-cytidine with phosphorothioate linkage
  modified_base 21: mod_base = OTHER; note = 2'-O-methyl-adenosine with phosphorothioate linkage
  modified_base 22: mod_base = OTHER; note = 2'-O-methyl-uridine
taataatgatggccagctccat

SEQ ID NO: 333 - RNA, 22 nt, synthetic construct
  source 1..22: mol_type = other RNA
  modified_base 1: mod_base = OTHER; note = 2'-O-methyl-uridine with phosphorothioate linkage
  modified_base 2: mod_base = OTHER; note = 2'-fluoro-uridine with phosphorothioate linkage
  modified_base 3: mod_base = OTHER; note = 2'-fluoro-uridine
  modified_base 4: mod_base = OTHER; note = 2'-O-methyl-uridine
  modified_base 5: mod_base = OTHER; note = 2'-fluoro-cytidine
  modified_base 6: mod_base = OTHER; note = 2'-O-methyl-uridine
  modified_base 7: mod_base = OTHER; note = 2'-fluoro-uridine
  modified_base 8: mod_base = OTHER; note = 2'-O-methyl-cytidine
  modified_base 9: mod_base = OTHER; note = 2'-O-methyl-cytidine
  modified_base 10: mod_base = OTHER; note = 2'-fluoro-uridine
  modified_base 11: mod_base = OTHER; note = 2'-O-methyl-guanosine
  modified_base 12: mod_base = OTHER; note = 2'-O-methyl-uridine
  modified_base 13: mod_base = OTHER; note = 2'-O-methyl-adenosine
  modified_base 14: mod_base = OTHER; note = 2'-fluoro-guanosine
  modified_base 15: mod_base = OTHER; note = 2'-O-methyl-guanosine
  modified_base 16: mod_base = OTHER; note = 2'-fluoro-adenosine
  modified_base 17: mod_base = OTHER; note = 2'-O-methyl-guanosine
  modified_base 18: mod_base = OTHER; note = 2'-O-methyl-cytidine
  modified_base 19: mod_base = OTHER; note = 2'-O-methyl-adenosine
  modified_base 20: mod_base = OTHER; note = 2'-O-methyl-cytidine with phosphorothioate linkage
  modified_base 21: mod_base = OTHER; note = 2'-O-methyl-uridine with phosphorothioate linkage
  modified_base 22: mod_base = OTHER; note = 2'-O-methyl-guanosine
ttttcttcctgtaggagcactg

SEQ ID NO: 334 - RNA, 22 nt, synthetic construct
  source 1..22: mol_type = other RNA
  modified_base 1: mod_base = OTHER; note = 2'-O-methyl-uridine with phosphorothioate linkage
  modified_base 2: mod_base = OTHER; note = 2'-fluoro-uridine with phosphorothioate linkage
  modified_base 3: mod_base = OTHER; note = 2'-fluoro-uridine
  modified_base 4: mod_base = OTHER; note = 2'-O-methyl-uridine
  modified_base 5: mod_base = OTHER; note = 2'-fluoro-uridine
  modified_base 6: mod_base = OTHER; note = 2'-O-methyl-uridine
  modified_base 7: mod_base = OTHER; note = 2'-fluoro-cytidine
  modified_base 8: mod_base = OTHER; note = 2'-O-methyl-uridine
  modified_base 9: mod_base = OTHER; note = 2'-O-methyl-uridine
  modified_base 10: mod_base = OTHER; note = 2'-fluoro-cytidine
  modified_base 11: mod_base = OTHER; note = 2'-O-methyl-cytidine
  modified_base 12: mod_base = OTHER; note = 2'-O-methyl-uridine
  modified_base 13: mod_base = OTHER; note = 2'-O-methyl-guanosine
  modified_base 14: mod_base = OTHER; note = 2'-fluoro-uridine
  modified_base 15: mod_base = OTHER; note = 2'-O-methyl-adenosine
  modified_base 16: mod_base = OTHER; note = 2'-fluoro-guanosine
  modified_base 17: mod_base = OTHER; note = 2'-O-methyl-guanosine
  modified_base 18: mod_base = OTHER; note = 2'-O-methyl-adenosine
  modified_base 19: mod_base = OTHER; note = 2'-O-methyl-guanosine
  modified_base 20: mod_base = OTHER; note = 2'-O-methyl-cytidine with phosphorothioate linkage
  modified_base 21: mod_base = OTHER; note = 2'-O-methyl-adenosine with phosphorothioate linkage
  modified_base 22: mod_base = OTHER; note = 2'-O-methyl-cytidine
ttttttcttcctgtaggagcac

SEQ ID NO: 335 - RNA, 22 nt, synthetic construct
  source 1..22: mol_type = other RNA
  modified_base 1: mod_base = OTHER; note = 2'-O-methyl-uridine with phosphorothioate linkage
  modified_base 2: mod_base = OTHER; note = 2'-fluoro-uridine with phosphorothioate linkage
  modified_base 3: mod_base = OTHER; note = 2'-fluoro-uridine
  modified_base 4: mod_base = OTHER; note = 2'-O-methyl-uridine
  modified_base 5: mod_base = OTHER; note = 2'-fluoro-adenosine
  modified_base 6: mod_base = OTHER; note = 2'-O-methyl-cytidine
  modified_base 7: mod_base = OTHER; note = 2'-fluoro-cytidine
  modified_base 8: mod_base = OTHER; note = 2'-O-methyl-adenosine
  modified_base 9: mod_base = OTHER; note = 2'-O-methyl-guanosine
  modified_base 10: mod_base = OTHER; note = 2'-fluoro-adenosine
  modified_base 11: mod_base = OTHER; note = 2'-O-methyl-uridine
  modified_base 12: mod_base = OTHER; note = 2'-O-methyl-uridine
  modified_base 13: mod_base = OTHER; note = 2'-O-methyl-guanosine
  modified_base 14: mod_base = OTHER; note = 2'-fluoro-cytidine
  modified_base 15: mod_base = OTHER; note = 2'-O-methyl-adenosine
  modified_base 16: mod_base = OTHER; note = 2'-fluoro-cytidine
  modified_base 17: mod_base = OTHER; note = 2'-O-methyl-uridine
  modified_base 18: mod_base = OTHER; note = 2'-O-methyl-cytidine
  modified_base 19: mod_base = OTHER; note = 2'-O-methyl-adenosine
  modified_base 20: mod_base = OTHER; note = 2'-O-methyl-guanosine with phosphorothioate linkage
  modified_base 21: mod_base = OTHER; note = 2'-O-methyl-adenosine with phosphorothioate linkage
  modified_base 22: mod_base = OTHER; note = 2'-O-methyl-guanosine
ttttaccagattgcactcagag

SEQ ID NO: 336 - RNA, 22 nt, synthetic construct
  source 1..22: mol_type = other RNA
  modified_base 1: mod_base = OTHER; note = 2'-O-methyl-uridine with phosphorothioate linkage
  modified_base 2: mod_base = OTHER; note = 2'-fluoro-adenosine with phosphorothioate linkage
  modified_base 3: mod_base = OTHER; note = 2'-fluoro-guanosine
  modified_base 4: mod_base = OTHER; note = 2'-O-methyl-cytidine
  modified_base 5: mod_base = OTHER; note = 2'-fluoro-adenosine
  modified_base 6: mod_base = OTHER; note = 2'-O-methyl-uridine
  modified_base 7: mod_base = OTHER; note = 2'-fluoro-uridine
  modified_base 8: mod_base = OTHER; note = 2'-O-methyl-uridine
  modified_base 9: mod_base = OTHER; note = 2'-O-methyl-adenosine
  modified_base 10: mod_base = OTHER; note = 2'-fluoro-cytidine
  modified_base 11: mod_base = OTHER; note = 2'-O-methyl-cytidine
  modified_base 12: mod_base = OTHER; note = 2'-O-methyl-adenosine
  modified_base 13: mod_base = OTHER; note = 2'-O-methyl-guanosine
  modified_base 14: mod_base = OTHER; note = 2'-fluoro-adenosine
  modified_base 15: mod_base = OTHER; note = 2'-O-methyl-uridine
  modified_base 16: mod_base = OTHER; note = 2'-fluoro-uridine
  modified_base 17: mod_base = OTHER; note = 2'-O-methyl-guanosine
  modified_base 18: mod_base = OTHER; note = 2'-O-methyl-cytidine
  modified_base 19: mod_base = OTHER; note = 2'-O-methyl-adenosine
  modified_base 20: mod_base = OTHER; note = 2'-O-methyl-cytidine with phosphorothioate linkage
  modified_base 21: mod_base = OTHER; note = 2'-O-methyl-uridine with phosphorothioate linkage
  modified_base 22: mod_base = OTHER; note = 2'-O-methyl-cytidine
tagcatttaccagattgcactc

SEQ ID NO: 337 - RNA, 22 nt, synthetic construct
  source 1..22: mol_type = other RNA
  modified_base 1: mod_base = OTHER; note = 2'-O-methyl-uridine with phosphorothioate linkage
  modified_base 2: mod_base = OTHER; note = 2'-fluoro-uridine with phosphorothioate linkage
  modified_base 3: mod_base = OTHER; note = 2'-fluoro-uridine
  modified_base 4: mod_base = OTHER; note = 2'-O-methyl-uridine
  modified_base 5: mod_base = OTHER; note = 2'-fluoro-guanosine
  modified_base 6: mod_base = OTHER; note = 2'-O-methyl-adenosine
  modified_base 7: mod_base = OTHER; note = 2'-fluoro-adenosine
  modified_base 8: mod_base = OTHER; note = 2'-O-methyl-cytidine
  modified_base 9: mod_base = OTHER; note = 2'-O-methyl-cytidine
  modified_base 10: mod_base = OTHER; note = 2'-fluoro-adenosine
  modified_base 11: mod_base = OTHER; note = 2'-O-methyl-adenosine
  modified_base 12: mod_base = OTHER; note = 2'-O-methyl-cytidine
  modified_base 13: mod_base = OTHER; note = 2'-O-methyl-adenosine
  modified_base 14: mod_base = OTHER; note = 2'-fluoro-guanosine
  modified_base 15: mod_base = OTHER; note = 2'-O-methyl-adenosine
  modified_base 16: mod_base = OTHER; note = 2'-fluoro-guanosine
  modified_base 17: mod_base = OTHER; note = 2'-O-methyl-guanosine
  modified_base 18: mod_base = OTHER; note = 2'-O-methyl-uridine
  modified_base 19: mod_base = OTHER; note = 2'-O-methyl-adenosine
  modified_base 20: mod_base = OTHER; note = 2'-O-methyl-guanosine with phosphorothioate linkage
  modified_base 21: mod_base = OTHER; note = 2'-O-methyl-adenosine with phosphorothioate linkage
  modified_base 22: mod_base = OTHER; note = 2'-O-methyl-cytidine
ttttgaaccaacagaggtagac

SEQ ID NO: 338 - RNA, 22 nt, synthetic construct
  source 1..22: mol_type = other RNA
  modified_base 1: mod_base = OTHER; note = 2'-O-methyl-uridine with phosphorothioate linkage
  modified_base 2: mod_base = OTHER; note = 2'-fluoro-adenosine with phosphorothioate linkage
  modified_base 3: mod_base = OTHER; note = 2'-fluoro-cytidine
  modified_base 4: mod_base = OTHER; note = 2'-O-methyl-adenosine
  modified_base 5: mod_base = OTHER; note = 2'-fluoro-adenosine
  modified_base 6: mod_base = OTHER; note = 2'-O-methyl-uridine
  modified_base 7: mod_base = OTHER; note = 2'-fluoro-cytidine
  modified_base 8: mod_base = OTHER; note = 2'-O-methyl-guanosine
  modified_base 9: mod_base = OTHER; note = 2'-O-methyl-uridine
  modified_base 10: mod_base = OTHER; note = 2'-fluoro-cytidine
  modified_base 11: mod_base = OTHER; note = 2'-O-methyl-cytidine
  modified_base 12: mod_base = OTHER; note = 2'-O-methyl-uridine
  modified_base 13: mod_base = OTHER; note = 2'-O-methyl-uridine
  modified_base 14: mod_base = OTHER; note = 2'-fluoro-guanosine
  modified_base 15: mod_base = OTHER; note = 2'-O-methyl-cytidine
  modified_base 16: mod_base = OTHER; note = 2'-fluoro-adenosine
  modified_base 17: mod_base = OTHER; note = 2'-O-methyl-adenosine
  modified_base 18: mod_base = OTHER; note = 2'-O-methyl-uridine
  modified_base 19: mod_base = OTHER; note = 2'-O-methyl-uridine
  modified_base 20: mod_base = OTHER; note = 2'-O-methyl-guanosine with phosphorothioate linkage
  modified_base 21: mod_base = OTHER; note = 2'-O-methyl-uridine with phosphorothioate linkage
  modified_base 22: mod_base = OTHER; note = 2'-O-methyl-cytidine
tacaatcgtccttgcaattgtc

SEQ ID NO: 339 - RNA, 22 nt, synthetic construct
  source 1..22: mol_type = other RNA
  modified_base 1: mod_base = OTHER; note = 2'-O-methyl-uridine with phosphorothioate linkage
  modified_base 2: mod_base = OTHER; note = 2'-fluoro-uridine with phosphorothioate linkage
  modified_base 3: mod_base = OTHER; note = 2'-fluoro-adenosine
  modified_base 4: mod_base = OTHER; note = 2'-O-methyl-cytidine
  modified_base 5: mod_base = OTHER; note = 2'-fluoro-cytidine
  modified_base 6: mod_base = OTHER; note = 2'-O-methyl-uridine
  modified_base 7: mod_base = OTHER; note = 2'-fluoro-uridine
  modified_base 8: mod_base = OTHER; note = 2'-O-methyl-uridine
  modified_base 9: mod_base = OTHER; note = 2'-O-methyl-uridine
  modified_base 10: mod_base = OTHER; note = 2'-fluoro-cytidine
  modified_base 11: mod_base = OTHER; note = 2'-O-methyl-cytidine
  modified_base 12: mod_base = OTHER; note = 2'-O-methyl-uridine
  modified_base 13: mod_base = OTHER; note = 2'-O-methyl-adenosine
  modified_base 14: mod_base = OTHER; note = 2'-fluoro-cytidine
  modified_base 15: mod_base = OTHER; note = 2'-O-methyl-uridine
  modified_base 16: mod_base = OTHER; note = 2'-fluoro-adenosine
  modified_base 17: mod_base = OTHER; note = 2'-O-methyl-uridine
  modified_base 18: mod_base = OTHER; note = 2'-O-methyl-uridine
  modified_base 19: mod_base = OTHER; note = 2'-O-methyl-uridine
  modified_base 20: mod_base = OTHER; note = 2'-O-methyl-cytidine with phosphorothioate linkage
  modified_base 21: mod_base = OTHER; note = 2'-O-methyl-cytidine with phosphorothioate linkage
  modified_base 22: mod_base = OTHER; note = 2'-O-methyl-uridine
ttaccttttcctactatttcct

SEQ ID NO: 340 - RNA, 22 nt, synthetic construct
  source 1..22: mol_type = other RNA
  modified_base 1: mod_base = OTHER; note = 2'-O-methyl-uridine with phosphorothioate linkage
  modified_base 2: mod_base = OTHER; note = 2'-fluoro-uridine with phosphorothioate linkage
  modified_base 3: mod_base = OTHER; note = 2'-fluoro-uridine
  modified_base 4: mod_base = OTHER; note = 2'-O-methyl-uridine
  modified_base 5: mod_base = OTHER; note = 2'-fluoro-cytidine
  modified_base 6: mod_base = OTHER; note = 2'-O-methyl-adenosine
  modified_base 7: mod_base = OTHER; note = 2'-fluoro-cytidine
  modified_base 8: mod_base = OTHER; note = 2'-O-methyl-adenosine
  modified_base 9: mod_base = OTHER; note = 2'-O-methyl-guanosine
  modified_base 10: mod_base = OTHER; note = 2'-fluoro-cytidine
  modified_base 11: mod_base = OTHER; note = 2'-O-methyl-cytidine
  modified_base 12: mod_base = OTHER; note = 2'-O-methyl-adenosine
  modified_base 13: mod_base = OTHER; note = 2'-O-methyl-cytidine
  modified_base 14: mod_base = OTHER; note = 2'-fluoro-adenosine
  modified_base 15: mod_base = OTHER; note = 2'-O-methyl-uridine
  modified_base 16: mod_base = OTHER; note = 2'-fluoro-cytidine
  modified_base 17: mod_base = OTHER; note = 2'-O-methyl-uridine
  modified_base 18: mod_base = OTHER; note = 2'-O-methyl-uridine
  modified_base 19: mod_base = OTHER; note = 2'-O-methyl-cytidine
  modified_base 20: mod_base = OTHER; note = 2'-O-methyl-cytidine with phosphorothioate linkage
  modified_base 21: mod_base = OTHER; note = 2'-O-methyl-cytidine with phosphorothioate linkage
  modified_base 22: mod_base = OTHER; note = 2'-O-methyl-cytidine
ttttcacagccacatcttcccc

SEQ ID NO: 341 - RNA, 22 nt, synthetic construct
  source 1..22: mol_type = other RNA
  modified_base 1: mod_base = OTHER; note = 2'-O-methyl-uridine with phosphorothioate linkage
  modified_base 2: mod_base = OTHER; note = 2'-fluoro-uridine with phosphorothioate linkage
  modified_base 3: mod_base = OTHER; note = 2'-fluoro-cytidine
  modified_base 4: mod_base = OTHER; note = 2'-O-methyl-uridine
  modified_base 5: mod_base = OTHER; note = 2'-fluoro-uridine
  modified_base 6: mod_base = OTHER; note = 2'-O-methyl-uridine
  modified_base 7: mod_base = OTHER; note = 2'-fluoro-cytidine
  modified_base 8: mod_base = OTHER; note = 2'-O-methyl-adenosine
  modified_base 9: mod_base = OTHER; note = 2'-O-methyl-uridine
  modified_base 10: mod_base = OTHER; note = 2'-fluoro-cytidine
  modified_base 11: mod_base = OTHER; note = 2'-O-methyl-uridine
  modified_base 12: mod_base = OTHER; note = 2'-O-methyl-cytidine
  modified_base 13: mod_base = OTHER; note = 2'-O-methyl-uridine
  modified_base 14: mod_base = OTHER; note = 2'-fluoro-guanosine
  modified_base 15: mod_base = OTHER; note = 2'-O-methyl-guanosine
  modified_base 16: mod_base = OTHER; note = 2'-fluoro-adenosine
  modified_base 17: mod_base = OTHER; note = 2'-O-methyl-guanosine
  modified_base 18: mod_base = OTHER; note = 2'-O-methyl-guanosine
  modified_base 19: mod_base = OTHER; note = 2'-O-methyl-adenosine
  modified_base 20: mod_base = OTHER; note = 2'-O-methyl-guanosine with phosphorothioate linkage
  modified_base 21: mod_base = OTHER; note = 2'-O-methyl-adenosine with phosphorothioate linkage
  modified_base 22: mod_base = OTHER; note = 2'-O-methyl-adenosine
ttctttcatctctggaggagaa

SEQ ID NO: 342 - RNA, 22 nt, synthetic construct
  source 1..22: mol_type = other RNA
  modified_base 1: mod_base = OTHER; note = 2'-O-methyl-uridine with phosphorothioate linkage
  modified_base 2: mod_base = OTHER; note = 2'-fluoro-adenosine with phosphorothioate linkage
  modified_base 3: mod_base = OTHER; note = 2'-fluoro-guanosine
  modified_base 4: mod_base = OTHER; note = 2'-O-methyl-adenosine
  modified_base 5: mod_base = OTHER; note = 2'-fluoro-uridine
  modified_base 6: mod_base = OTHER; note = 2'-O-methyl-cytidine
  modified_base 7: mod_base = OTHER; note = 2'-fluoro-uridine
  modified_base 8: mod_base = OTHER; note = 2'-O-methyl-uridine
  modified_base 9: mod_base = OTHER; note = 2'-O-methyl-uridine
  modified_base 10: mod_base = OTHER; note = 2'-fluoro-cytidine
  modified_base 11: mod_base = OTHER; note = 2'-O-methyl-adenosine
  modified_base 12: mod_base = OTHER; note = 2'-O-methyl-uridine
  modified_base 13: mod_base = OTHER; note = 2'-O-methyl-cytidine
  modified_base 14: mod_base = OTHER; note = 2'-fluoro-uridine
  modified_base 15: mod_base = OTHER; note = 2'-O-methyl-cytidine
  modified_base 16: mod_base = OTHER; note = 2'-fluoro-uridine
  modified_base 17: mod_base = OTHER; note = 2'-O-methyl-guanosine
  modified_base 18: mod_base = OTHER; note = 2'-O-methyl-guanosine
  modified_base 19: mod_base = OTHER; note = 2'-O-methyl-adenosine
  modified_base 20: mod_base = OTHER; note = 2'-O-methyl-guanosine with phosphorothioate linkage
  modified_base 21: mod_base = OTHER; note = 2'-O-methyl-guanosine with phosphorothioate linkage
  modified_base 22: mod_base = OTHER; note = 2'-O-methyl-adenosine
tagatctttcatctctggagga

SEQ ID NO: 343 - RNA, 22 nt, synthetic construct
  source 1..22: mol_type = other RNA
  modified_base 1: mod_base = OTHER; note = 2'-O-methyl-uridine with phosphorothioate linkage
  modified_base 2: mod_base = OTHER; note = 2'-fluoro-adenosine with phosphorothioate linkage
  modified_base 3: mod_base = OTHER; note = 2'-fluoro-uridine
  modified_base 4: mod_base = OTHER; note = 2'-O-methyl-uridine
  modified_base 5: mod_base = OTHER; note = 2'-fluoro-uridine
  modified_base 6: mod_base = OTHER; note = 2'-O-methyl-cytidine
  modified_base 7: mod_base = OTHER; note = 2'-fluoro-uridine
  modified_base 8: mod_base = OTHER; note = 2'-O-methyl-guanosine
  modified_base 9: mod_base = OTHER; note = 2'-O-methyl-cytidine
  modified_base 10: mod_base = OTHER; note = 2'-fluoro-cytidine
  modified_base 11: mod_base = OTHER; note = 2'-O-methyl-uridine
  modified_base 12: mod_base = OTHER; note = 2'-O-methyl-cytidine
  modified_base 13: mod_base = OTHER; note = 2'-O-methyl-adenosine
  modified_base 14: mod_base = OTHER; note = 2'-fluoro-cytidine
  modified_base 15: mod_base = OTHER; note = 2'-O-methyl-guanosine
  modified_base 16: mod_base = OTHER; note = 2'-fluoro-adenosine
  modified_base 17: mod_base = OTHER; note = 2'-O-methyl-adenosine
  modified_base 18: mod_base = OTHER; note = 2'-O-methyl-adenosine
  modified_base 19: mod_base = OTHER; note = 2'-O-methyl-cytidine
  modified_base 20: mod_base = OTHER; note = 2'-O-methyl-cytidine with phosphorothioate linkage
  modified_base 21: mod_base = OTHER; note = 2'-O-methyl-adenosine with phosphorothioate linkage
  modified_base 22: mod_base = OTHER; note = 2'-O-methyl-adenosine
tatttctgcctcacgaaaccaa

SEQ ID NO: 344 - RNA, 22 nt, synthetic construct
  source 1..22: mol_type = other RNA
  modified_base 1: mod_base = OTHER; note = 2'-O-methyl-uridine with phosphorothioate linkage
  modified_base 2: mod_base = OTHER; note = 2'-fluoro-adenosine with phosphorothioate linkage
  modified_base 3: mod_base = OTHER; note = 2'-fluoro-adenosine
  modified_base 4: mod_base = OTHER; note = 2'-O-methyl-uridine
  modified_base 5: mod_base = OTHER; note = 2'-fluoro-uridine
  modified_base 6: mod_base = OTHER; note = 2'-O-methyl-uridine
  modified_base 7: mod_base = OTHER; note = 2'-fluoro-cytidine
  modified_base 8: mod_base = OTHER; note = 2'-O-methyl-uridine
  modified_base 9: mod_base = OTHER; note = 2'-O-methyl-guanosine
  modified_base 10: mod_base = OTHER; note = 2'-fluoro-cytidine
  modified_base 11: mod_base = OTHER; note = 2'-O-methyl-cytidine
  modified_base 12: mod_base = OTHER; note = 2'-O-methyl-uridine
  modified_base 13: mod_base = OTHER; note = 2'-O-methyl-cytidine
  modified_base 14: mod_base = OTHER; note = 2'-fluoro-adenosine
  modified_base 15: mod_base = OTHER; note = 2'-O-methyl-cytidine
  modified_base 16: mod_base = OTHER; note = 2'-fluoro-guanosine
  modified_base 17: mod_base = OTHER; note = 2'-O-methyl-adenosine
  modified_base 18: mod_base = OTHER; note = 2'-O-methyl-adenosine
  modified_base 19: mod_base = OTHER; note = 2'-O-methyl-adenosine
  modified_base 20: mod_base = OTHER; note = 2'-O-methyl-cytidine with phosphorothioate linkage
  modified_base 21: mod_base = OTHER; note = 2'-O-methyl-cytidine with phosphorothioate linkage
  modified_base 22: mod_base = OTHER; note = 2'-O-methyl-adenosine
taatttctgcctcacgaaacca

SEQ ID NO: 345 - RNA, 22 nt, synthetic construct
  source 1..22: mol_type = other RNA
  modified_base 1: mod_base = OTHER; note = 2'-O-methyl-uridine with phosphorothioate linkage
  modified_base 2: mod_base = OTHER; note = 2'-fluoro-uridine with phosphorothioate linkage
  modified_base 3: mod_base = OTHER; note = 2'-fluoro-uridine
  modified_base 4: mod_base = OTHER; note = 2'-O-methyl-cytidine
  modified_base 5: mod_base = OTHER; note = 2'-fluoro-adenosine
  modified_base 6: mod_base = OTHER; note = 2'-O-methyl-uridine
  modified_base 7: mod_base = OTHER; note = 2'-fluoro-guanosine
  modified_base 8: mod_base = OTHER; note = 2'-O-methyl-uridine
  modified_base 9: mod_base = OTHER; note = 2'-O-methyl-cytidine
  modified_base 10: mod_base = OTHER; note = 2'-fluoro-guanosine
  modified_base 11: mod_base = OTHER; note = 2'-O-methyl-cytidine
  modified_base 12: mod_base = OTHER; note = 2'-O-methyl-adenosine
  modified_base 13: mod_base = OTHER; note = 2'-O-methyl-guanosine
  modified_base 14: mod_base = OTHER; note = 2'-fluoro-cytidine
  modified_base 15: mod_base = OTHER; note = 2'-O-methyl-adenosine
  modified_base 16: mod_base = OTHER; note = 2'-fluoro-uridine
  modified_base 17: mod_base = OTHER; note = 2'-O-methyl-guanosine
  modified_base 18: mod_base = OTHER; note = 2'-O-methyl-adenosine
  modified_base 19: mod_base = OTHER; note = 2'-O-methyl-cytidine
  modified_base 20: mod_base = OTHER; note = 2'-O-methyl-cytidine with phosphorothioate linkage
  modified_base 21: mod_base = OTHER; note = 2'-O-methyl-guanosine with phosphorothioate linkage
  modified_base 22: mod_base = OTHER; note = 2'-O-methyl-uridine
tttcatgtcgcagcatgaccgt

SEQ ID NO: 346 - RNA, 22 nt, synthetic construct
  source 1..22: mol_type = other RNA
  modified_base 1: mod_base = OTHER; note = 2'-O-methyl-uridine with phosphorothioate linkage
  modified_base 2: mod_base = OTHER; note = 2'-fluoro-uridine with phosphorothioate linkage
  modified_base 3: mod_base = OTHER; note = 2'-fluoro-uridine
  modified_base 4: mod_base = OTHER; note = 2'-O-methyl-uridine
  modified_base 5: mod_base = OTHER; note = 2'-fluoro-guanosine
  modified_base 6: mod_base = OTHER; note = 2'-O-methyl-uridine
  modified_base 7: mod_base = OTHER; note = 2'-fluoro-uridine
  modified_base 8: mod_base = OTHER; note = 2'-O-methyl-guanosine
  modified_base 9: mod_base = OTHER; note = 2'-O-methyl-uridine
  modified_base 10: mod_base = OTHER; note = 2'-fluoro-cytidine
  modified_base 11: mod_base = OTHER; note = 2'-O-methyl-adenosine
  modified_base 12: mod_base = OTHER; note = 2'-O-methyl-guanosine
  modified_base 13: mod_base = OTHER; note = 2'-O-methyl-cytidine
  modified_base 14: mod_base = OTHER; note = 2'-fluoro-adenosine
  modified_base 15: mod_base = OTHER; note = 2'-O-methyl-guanosine
  modified_base 16: mod_base = OTHER; note = 2'-fluoro-cytidine
  modified_base 17: mod_base = OTHER; note = 2'-O-methyl-adenosine
  modified_base 18: mod_base = OTHER; note = 2'-O-methyl-adenosine
  modified_base 19: mod_base = OTHER; note = 2'-O-methyl-uridine
  modified_base 20: mod_base = OTHER; note = 2'-O-methyl-guanosine with phosphorothioate linkage
  modified_base 21: mod_base = OTHER; note = 2'-O-methyl-adenosine with phosphorothioate linkage
  modified_base 22: mod_base = OTHER; note = 2'-O-methyl-adenosine
ttttgttgtcagcagcaatgaa

SEQ ID NO: 347 - RNA, 22 nt, synthetic construct
  source 1..22: mol_type = other RNA
  modified_base 1: mod_base = OTHER; note = 2'-O-methyl-uridine with phosphorothioate linkage
  modified_base 2: mod_base = OTHER; note = 2'-fluoro-adenosine with phosphorothioate linkage
  modified_base 3: mod_base = OTHER; note = 2'-fluoro-guanosine
  modified_base 4: mod_base = OTHER; note = 2'-O-methyl-uridine
  modified_base 5: mod_base = OTHER; note = 2'-fluoro-cytidine
  modified_base 6: mod_base = OTHER; note = 2'-O-methyl-adenosine
  modified_base 7: mod_base = OTHER; note = 2'-fluoro-uridine
  modified_base 8: mod_base = OTHER; note = 2'-O-methyl-adenosine
  modified_base 9: mod_base = OTHER; note = 2'-O-methyl-uridine
  modified_base 10: mod_base = OTHER; note = 2'-fluoro-adenosine
  modified_base 11: mod_base = OTHER; note = 2'-O-methyl-adenosine
  modified_base 12: mod_base = OTHER; note = 2'-O-methyl-guanosine
  modified_base 13: mod_base = OTHER; note = 2'-O-methyl-guanosine
  modified_base 14: mod_base = OTHER; note = 2'-fluoro-adenosine
  modified_base 15: mod_base = OTHER; note = 2'-O-methyl-guanosine
  modified_base 16: mod_base = OTHER; note = 2'-fluoro-cytidine
  modified_base 17: mod_base = OTHER; note = 2'-O-methyl-cytidine
  modified_base 18: mod_base = OTHER; note = 2'-O-methyl-cytidine
  modified_base 19: mod_base = OTHER; note = 2'-O-methyl-uridine
  modified_base 20: mod_base = OTHER; note = 2'-O-methyl-guanosine with phosphorothioate linkage
  modified_base 21: mod_base = OTHER; note = 2'-O-methyl-uridine with phosphorothioate linkage
  modified_base 22: mod_base = OTHER; note = 2'-O-methyl-uridine
tagtcatataaggagccctgtt

SEQ ID NO: 348 - RNA, 22 nt, synthetic construct
  source 1..22: mol_type = other RNA
  modified_base 1: mod_base = OTHER; note = 2'-O-methyl-uridine with phosphorothioate linkage
  modified_base 2: mod_base = OTHER; note = 2'-fluoro-uridine with phosphorothioate linkage
  modified_base 3: mod_base = OTHER; note = 2'-fluoro-adenosine
  modified_base 4: mod_base = OTHER; note = 2'-O-methyl-uridine
  modified_base 5: mod_base = OTHER; note = 2'-fluoro-guanosine
  modified_base 6: mod_base = OTHER; note = 2'-O-methyl-adenosine
  modified_base 7: mod_base = OTHER; note = 2'-fluoro-adenosine
  modified_base 8: mod_base = OTHER; note = 2'-O-methyl-guanosine
  modified_base 9: mod_base = OTHER; note = 2'-O-methyl-guanosine
  modified_base 10: mod_base = OTHER; note = 2'-fluoro-uridine
  modified_base 11: mod_base = OTHER; note = 2'-O-methyl-guanosine
  modified_base 12: mod_base = OTHER; note = 2'-O-methyl-uridine
  modified_base 13: mod_base = OTHER; note = 2'-O-methyl-guanosine
  modified_base 14: mod_base = OTHER; note = 2'-fluoro-cytidine
  modified_base 15: mod_base = OTHER; note = 2'-O-methyl-cytidine
  modified_base 16: mod_base = OTHER; note = 2'-fluoro-adenosine
  modified_base 17: mod_base = OTHER; note = 2'-O-methyl-guanosine
  modified_base 18: mod_base = OTHER; note = 2'-O-methyl-adenosine
  modified_base 19: mod_base = OTHER; note = 2'-O-methyl-cytidine
  modified_base 20: mod_base = OTHER; note = 2'-O-methyl-cytidine with phosphorothioate linkage
  modified_base 21: mod_base = OTHER; note = 2'-O-methyl-adenosine with phosphorothioate linkage
  modified_base 22: mod_base = OTHER; note = 2'-O-methyl-cytidine
ttatgaaggtgtgccagaccac

SEQ ID NO: 349 - RNA, 22 nt, synthetic construct
  source 1..22: mol_type = other RNA
  modified_base 1: mod_base = OTHER; note = 2'-O-methyl-uridine with phosphorothioate linkage
  modified_base 2: mod_base = OTHER; note = 2'-fluoro-adenosine with phosphorothioate linkage
  modified_base 3: mod_base = OTHER; note = 2'-fluoro-uridine
  modified_base 4: mod_base = OTHER; note = 2'-O-methyl-adenosine
  modified_base 5: mod_base = OTHER; note = 2'-fluoro-uridine
  modified_base 6: mod_base = OTHER; note = 2'-O-methyl-guanosine
  modified_base 7: mod_base = OTHER; note = 2'-fluoro-adenosine
  modified_base 8: mod_base = OTHER; note = 2'-O-methyl-adenosine
  modified_base 9: mod_base = OTHER; note = 2'-O-methyl-guanosine
  modified_base 10: mod_base = OTHER; note = 2'-fluoro-guanosine
  modified_base 11: mod_base = OTHER; note = 2'-O-methyl-uridine
  modified_base 12: mod_base = OTHER; note = 2'-O-methyl-guanosine
  modified_base 13: mod_base = OTHER; note = 2'-O-methyl-uridine
  modified_base 14: mod_base = OTHER; note = 2'-fluoro-guanosine
  modified_base 15: mod_base = OTHER; note = 2'-O-methyl-cytidine
  modified_base 16: mod_base = OTHER; note = 2'-fluoro-cytidine
  modified_base 17: mod_base = OTHER; note = 2'-O-methyl-adenosine
  modified_base 18: mod_base = OTHER; note = 2'-O-methyl-guanosine
  modified_base 19: mod_base = OTHER; note = 2'-O-methyl-adenosine
  modified_base 20: mod_base = OTHER; note = 2'-O-methyl-cytidine with phosphorothioate linkage
  modified_base 21: mod_base = OTHER; note = 2'-O-methyl-cytidine with phosphorothioate linkage
  modified_base 22: mod_base = OTHER; note = 2'-O-methyl-adenosine
tatatgaaggtgtgccagacca

SEQ ID NO: 350 - RNA, 22 nt, synthetic construct
  source 1..22: mol_type = other RNA
  modified_base 1: mod_base = OTHER; note = 2'-O-methyl-uridine with phosphorothioate linkage
  modified_base 2: mod_base = OTHER; note = 2'-fluoro-uridine with phosphorothioate linkage
  modified_base 3: mod_base = OTHER; note = 2'-fluoro-uridine
  modified_base 4: mod_base = OTHER; note = 2'-O-methyl-guanosine
  modified_base 5: mod_base = OTHER; note = 2'-fluoro-adenosine
  modified_base 6: mod_base = OTHER; note = 2'-O-methyl-uridine
  modified_base 7: mod_base = OTHER; note = 2'-fluoro-uridine
  modified_base 8: mod_base = OTHER; note = 2'-O-methyl-uridine
  modified_base 9: mod_base = OTHER; note = 2'-O-methyl-uridine
  modified_base 10: mod_base = OTHER; note = 2'-fluoro-adenosine
  modified_base 11: mod_base = OTHER; note = 2'-O-methyl-uridine
  modified_base 12: mod_base = OTHER; note = 2'-O-methyl-guanosine
  modified_base 13: mod_base = OTHER; note = 2'-O-methyl-uridine
  modified_base 14: mod_base = OTHER; note = 2'-fluoro-cytidine
  modified_base 15: mod_base = OTHER; note = 2'-O-methyl-uridine
  modified_base 16: mod_base = OTHER; note = 2'-fluoro-cytidine
  modified_base 17: mod_base = OTHER; note = 2'-O-methyl-guanosine
  modified_base 18: mod_base = OTHER; note = 2'-O-methyl-adenosine
  modified_base 19: mod_base = OTHER; note = 2'-O-methyl-uridine
  modified_base 20: mod_base = OTHER; note = 2'-O-methyl-guanosine with phosphorothioate linkage
  modified_base 21: mod_base = OTHER; note = 2'-O-methyl-adenosine with phosphorothioate linkage
  modified_base 22: mod_base = OTHER; note = 2'-O-methyl-guanosine
tttgattttatgtctcgatgag

SEQ ID NO: 351 - RNA, 22 nt, synthetic construct
  source 1..22: mol_type = other RNA
  modified_base 1: mod_base = OTHER; note = 2'-O-methyl-uridine with phosphorothioate linkage
  modified_base 2: mod_base = OTHER; note = 2'-fluoro-uridine with phosphorothioate linkage
  modified_base 3: mod_base = OTHER; note = 2'-fluoro-cytidine
  modified_base 4: mod_base = OTHER; note = 2'-O-methyl-uridine
  modified_base 5: mod_base = OTHER; note = 2'-fluoro-uridine
  modified_base 6: mod_base = OTHER; note = 2'-O-methyl-uridine
  modified_base 7: mod_base = OTHER; note = 2'-fluoro-guanosine
  modified_base 8: mod_base = OTHER; note = 2'-O-methyl-adenosine
  modified_base 9: mod_base = OTHER; note = 2'-O-methyl-uridine
  modified_base 10: mod_base = OTHER; note = 2'-fluoro-uridine
  modified_base 11: mod_base = OTHER; note = 2'-O-methyl-uridine
  modified_base 12: mod_base = OTHER; note = 2'-O-methyl-uridine
  modified_base 13: mod_base = OTHER; note = 2'-O-methyl-adenosine
  modified_base 14: mod_base = OTHER; note = 2'-fluoro-uridine
  modified_base 15: mod_base = OTHER; note = 2'-O-methyl-guanosine
  modified_base 16: mod_base = OTHER; note = 2'-fluoro-uridine
  modified_base 17: mod_base = OTHER; note = 2'-O-methyl-cytidine
  modified_base 18: mod_base = OTHER; note = 2'-O-methyl-uridine
  modified_base 19: mod_base = OTHER; note = 2'-O-methyl-cytidine
  modified_base 20: mod_base = OTHER; note = 2'-O-methyl-guanosine with phosphorothioate linkage
  modified_base 21: mod_base = OTHER; note = 2'-O-methyl-adenosine with phosphorothioate linkage
  modified_base 22: mod_base = OTHER; note = 2'-O-methyl-uridine
ttctttgattttatgtctcgat

SEQ ID NO: 352 - RNA, 22 nt, synthetic construct
  source 1..22: mol_type = other RNA
  modified_base 1: mod_base = OTHER; note = 2'-O-methyl-uridine with phosphorothioate linkage
  modified_base 2: mod_base = OTHER; note = 2'-fluoro-uridine with phosphorothioate linkage
  modified_base 3: mod_base = OTHER; note = 2'-fluoro-adenosine
  modified_base 4: mod_base = OTHER; note = 2'-O-methyl-guanosine
  modified_base 5: mod_base = OTHER; note = 2'-fluoro-uridine
  modified_base 6: mod_base = OTHER; note = 2'-O-methyl-guanosine
  modified_base 7: mod_base = OTHER; note = 2'-fluoro-uridine
  modified_base 8: mod_base = OTHER; note = 2'-O-methyl-uridine
  modified_base 9: mod_base = OTHER; note = 2'-O-methyl-cytidine
  modified_base 10: mod_base = OTHER; note = 2'-fluoro-adenosine
  modified_base 11: mod_base = OTHER; note = 2'-O-methyl-guanosine
  modified_base 12: mod_base = OTHER; note = 2'-O-methyl-uridine
  modified_base 13: mod_base = OTHER; note = 2'-O-methyl-adenosine
  modified_base 14: mod_base = OTHER; note = 2'-fluoro-uridine
  modified_base 15: mod_base = OTHER; note = 2'-O-methyl-uridine
  modified_base 16: mod_base = OTHER; note = 2'-fluoro-guanosine
  modified_base 17: mod_base = OTHER; note = 2'-O-methyl-adenosine
  modified_base 18: mod_base = OTHER; note = 2'-O-methyl-adenosine
  modified_base 19: mod_base = OTHER; note = 2'-O-methyl-uridine
  modified_base 20: mod_base = OTHER; note = 2'-O-methyl-cytidine with phosphorothioate linkage
  modified_base 21: mod_base = OTHER; note = 2'-O-methyl-adenosine with phosphorothioate linkage
  modified_base 22: mod_base = OTHER; note = 2'-O-methyl-uridine
ttagtgttcagtattgaatcat

SEQ ID NO: 353 - RNA, 22 nt, synthetic construct
  source 1..22: mol_type = other RNA
  modified_base 1: mod_base = OTHER; note = 2'-O-methyl-uridine with phosphorothioate linkage
  modified_base 2: mod_base = OTHER; note = 2'-fluoro-uridine with phosphorothioate linkage
  modified_base 3: mod_base = OTHER; note = 2'-fluoro-adenosine
  modified_base 4: mod_base = OTHER; note = 2'-O-methyl-guanosine
  modified_base 5: mod_base = OTHER; note = 2'-fluoro-guanosine
  modified_base 6: mod_base = OTHER; note = 2'-O-methyl-adenosine
  modified_base 7: mod_base = OTHER; note = 2'-fluoro-uridine
  modified_base 8: mod_base = OTHER; note = 2'-O-methyl-uridine
  modified_base 9: mod_base = OTHER; note = 2'-O-methyl-cytidine
  modified_base 10: mod_base = OTHER; note = 2'-fluoro-uridine
  modified_base 11: mod_base = OTHER; note = 2'-O-methyl-guanosine
  modified_base 12: mod_base = OTHER; note = 2'-O-methyl-adenosine
  modified_base 13: mod_base = OTHER; note = 2'-O-methyl-guanosine
  modified_base 14: mod_base = OTHER; note = 2'-fluoro-guanosine
  modified_base 15: mod_base = OTHER; note = 2'-O-methyl-uridine
  modified_base 16: mod_base = OTHER; note = 2'-fluoro-adenosine
  modified_base 17: mod_base = OTHER; note = 2'-O-methyl-uridine
  modified_base 18: mod_base = OTHER; note = 2'-O-methyl-guanosine
  modified_base 19: mod_base = OTHER; note = 2'-O-methyl-uridine
  modified_base 20: mod_base = OTHER; note = 2'-O-methyl-cytidine with phosphorothioate linkage
  modified_base 21: mod_base = OTHER; note = 2'-O-methyl-guanosine with phosphorothioate linkage
  modified_base 22: mod_base = OTHER; note = 2'-O-methyl-adenosine
ttaggattctgaggtatgtcga

SEQ ID NO: 354 - RNA, 22 nt, synthetic construct
  source 1..22: mol_type = other RNA
  modified_base 1: mod_base = OTHER; note = 2'-O-methyl-uridine with phosphorothioate linkage
  modified_base 2: mod_base = OTHER; note = 2'-fluoro-adenosine with phosphorothioate linkage
  modified_base 3: mod_base = OTHER; note = 2'-fluoro-uridine
  modified_base 4: mod_base = OTHER; note = 2'-O-methyl-uridine
  modified_base 5: mod_base = OTHER; note = 2'-fluoro-uridine
  modified_base 6: mod_base = OTHER; note = 2'-O-methyl-cytidine
  modified_base 7: mod_base = OTHER; note = 2'-fluoro-adenosine
  modified_base 8: mod_base = OTHER; note = 2'-O-methyl-guanosine
  modified_base 9: mod_base = OTHER; note = 2'-O-methyl-guanosine
  modified_base 10: mod_base = OTHER; note = 2'-fluoro-adenosine
  modified_base 11: mod_base = OTHER; note = 2'-O-methyl-guanosine
  modified_base 12: mod_base = OTHER; note = 2'-O-methyl-cytidine
  modified_base 13: mod_base = OTHER; note = 2'-O-methyl-cytidine
  modified_base 14: mod_base = OTHER; note = 2'-fluoro-adenosine
  modified_base 15: mod_base = OTHER; note = 2'-O-methyl-uridine
  modified_base 16: mod_base = OTHER; note = 2'-fluoro-adenosine
  modified_base 17: mod_base = OTHER; note = 2'-O-methyl-uridine
  modified_base 18: mod_base = OTHER; note = 2'-O-methyl-adenosine
  modified_base 19: mod_base = OTHER; note = 2'-O-methyl-cytidine
  modified_base 20: mod_base = OTHER; note = 2'-O-methyl-cytidine with phosphorothioate linkage
  modified_base 21: mod_base = OTHER; note = 2'-O-methyl-uridine with phosphorothioate linkage
  modified_base 22: mod_base = OTHER; note = 2'-O-methyl-cytidine
tatttcaggagccatatacctc

SEQ ID NO: 355 - RNA, 22 nt, synthetic construct
  source 1..22: mol_type = other RNA
  modified_base 1: mod_base = OTHER; note = 2'-O-methyl-uridine with phosphorothioate linkage
  modified_base 2: mod_base = OTHER; note = 2'-fluoro-uridine with phosphorothioate linkage
  modified_base 3: mod_base = OTHER; note = 2'-fluoro-cytidine
  modified_base 4: mod_base = OTHER; note = 2'-O-methyl-guanosine
  modified_base 5: mod_base = OTHER; note = 2'-fluoro-uridine
  modified_base 6: mod_base = OTHER; note = 2'-O-methyl-uridine
  modified_base 7: mod_base = OTHER; note = 2'-fluoro-uridine
  modified_base 8: mod_base = OTHER; note = 2'-O-methyl-guanosine
  modified_base 9: mod_base = OTHER; note = 2'-O-methyl-adenosine
  modified_base 10: mod_base = OTHER; note = 2'-fluoro-adenosine
  modified_base 11: mod_base = OTHER; note = 2'-O-methyl-guanosine
  modified_base 12: mod_base = OTHER; note = 2'-O-methyl-guanosine
  modified_base 13: mod_base = OTHER; note = 2'-O-methyl-adenosine
  modified_base 14: mod_base = OTHER; note = 2'-fluoro-cytidine
  modified_base 15: mod_base = OTHER; note = 2'-O-methyl-uridine
  modified_base 16: mod_base = OTHER; note = 2'-fluoro-cytidine
  modified_base 17: mod_base = OTHER; note = 2'-O-methyl-adenosine
  modified_base 18: mod_base = OTHER; note = 2'-O-methyl-adenosine
  modified_base 19: mod_base = OTHER; note = 2'-O-methyl-adenosine
  modified_base 20: mod_base = OTHER; note = 2'-O-methyl-guanosine with phosphorothioate linkage
  modified_base 21: mod_base = OTHER; note = 2'-O-methyl-adenosine with phosphorothioate linkage
  modified_base 22: mod_base = OTHER; note = 2'-O-methyl-uridine
ttcgtttgaaggactcaaagat

SEQ ID NO: 356 - RNA, 22 nt, synthetic construct
  source 1..22: mol_type = other RNA
  modified_base 1: mod_base = OTHER; note = 2'-O-methyl-uridine with phosphorothioate linkage
  modified_base 2: mod_base = OTHER; note = 2'-fluoro-adenosine with phosphorothioate linkage
  modified_base 3: mod_base = OTHER; note = 2'-fluoro-adenosine
  modified_base 4: mod_base = OTHER; note = 2'-O-methyl-cytidine
  modified_base 5: mod_base = OTHER; note = 2'-fluoro-uridine
  modified_base 6: mod_base = OTHER; note = 2'-O-methyl-uridine
  modified_base 7: mod_base = OTHER; note = 2'-fluoro-uridine
  modified_base 8: mod_base = OTHER; note = 2'-O-methyl-guanosine
  modified_base 9: mod_base = OTHER; note = 2'-O-methyl-cytidine
  modified_base 10: mod_base = OTHER; note = 2'-fluoro-cytidine
  modified_base 11: mod_base = OTHER; note = 2'-O-methyl-adenosine
  modified_base 12: mod_base = OTHER; note = 2'-O-methyl-cytidine
  modified_base 13: mod_base = OTHER; note = 2'-O-methyl-uridine
  modified_base 14: mod_base = OTHER; note = 2'-fluoro-guanosine
  modified_base 15: mod_base = OTHER; note = 2'-O-methyl-guanosine
  modified_base 16: mod_base = OTHER; note = 2'-fluoro-uridine
  modified_base 17: mod_base = OTHER; note = 2'-O-methyl-uridine
  modified_base 18: mod_base = OTHER; note = 2'-O-methyl-uridine
  modified_base 19: mod_base = OTHER; note = 2'-O-methyl-guanosine
  modified_base 20: mod_base = OTHER; note = 2'-O-methyl-guanosine with phosphorothioate linkage
  modified_base 21: mod_base = OTHER; note = 2'-O-methyl-guanosine with phosphorothioate linkage
  modified_base 22: mod_base = OTHER; note = 2'-O-methyl-adenosine
taactttgccactggtttggga

SEQ ID NO: 357 - RNA, 22 nt, synthetic construct
  source 1..22: mol_type = other RNA
  modified_base 1: mod_base = OTHER; note = 2'-O-methyl-uridine with phosphorothioate linkage
  modified_base 2: mod_base = OTHER; note = 2'-fluoro-uridine with phosphorothioate linkage
  modified_base 3: mod_base = OTHER; note = 2'-fluoro-uridine
  modified_base 4: mod_base = OTHER; note = 2'-O-methyl-cytidine
  modified_base 5: mod_base = OTHER; note = 2'-fluoro-adenosine
  modified_base 6: mod_base = OTHER; note = 2'-O-methyl-cytidine
  modified_base 7: mod_base = OTHER; note = 2'-fluoro-adenosine
  modified_base 8: mod_base = OTHER; note = 2'-O-methyl-adenosine
  modified_base 9: mod_base = OTHER; note = 2'-O-methyl-cytidine
  modified_base 10: mod_base = OTHER; note = 2'-fluoro-uridine
  modified_base 11: mod_base = OTHER; note = 2'-O-methyl-uridine
  modified_base 12: mod_base = OTHER; note = 2'-O-methyl-uridine
  modified_base 13: mod_base = OTHER; note = 2'-O-methyl-guanosine
  modified_base 14: mod_base = OTHER; note = 2'-fluoro-cytidine
  modified_base 15: mod_base = OTHER; note = 2'-O-methyl-cytidine
  modified_base 16: mod_base = OTHER; note = 2'-fluoro-adenosine
  modified_base 17: mod_base = OTHER; note = 2'-O-methyl-cytidine
  modified_base 18: mod_base = OTHER; note = 2'-O-methyl-uridine
  modified_base 19: mod_base = OTHER; note = 2'-O-methyl-guanosine
  modified_base 20: mod_base = OTHER; note = 2'-O-methyl-guanosine with phosphorothioate linkage
  modified_base 21: mod_base = OTHER; note = 2'-O-methyl-uridine with phosphorothioate linkage
  modified_base 22: mod_base = OTHER; note = 2'-O-methyl-uridine
tttcacaactttgccactggtt

SEQ ID NO: 358 - RNA, 22 nt, synthetic construct
  source 1..22: mol_type = other RNA
  modified_base 1: mod_base = OTHER; note = 2'-O-methyl-uridine with phosphorothioate linkage
  modified_base 2: mod_base = OTHER; note = 2'-fluoro-uridine with phosphorothioate linkage
  modified_base 3: mod_base = OTHER; note = 2'-fluoro-adenosine
  modified_base 4: mod_base = OTHER; note = 2'-O-methyl-cytidine
  modified_base 5: mod_base = OTHER; note = 2'-fluoro-guanosine
  modified_base 6: mod_base = OTHER; note = 2'-O-methyl-adenosine
  modified_base 7: mod_base = OTHER; note = 2'-fluoro-adenosine
  modified_base 8: mod_base = OTHER; note = 2'-O-methyl-guanosine
  modified_base 9: mod_base = OTHER; note = 2'-O-methyl-adenosine
  modified_base 10: mod_base = OTHER; note = 2'-fluoro-guanosine
  modified_base 11: mod_base = OTHER; note = 2'-O-methyl-cytidine
  modified_base 12: mod_base = OTHER; note = 2'-O-methyl-adenosine
  modified_base 13: mod_base = OTHER; note = 2'-O-methyl-guanosine
  modified_base 14: mod_base = OTHER; note = 2'-fluoro-uridine
  modified_base 15: mod_base = OTHER; note = 2'-O-methyl-uridine
  modified_base 16: mod_base = OTHER; note = 2'-fluoro-adenosine
  modified_base 17: mod_base = OTHER; note = 2'-O-methyl-guanosine
  modified_base 18: mod_base = OTHER; note = 2'-O-methyl-guanosine
  modified_base 19: mod_base = OTHER; note = 2'-O-methyl-cytidine
  modified_base 20: mod_base = OTHER; note = 2'-O-methyl-guanosine with phosphorothioate linkage
  modified_base 21: mod_base = OTHER; note = 2'-O-methyl-guanosine with phosphorothioate linkage
  modified_base 22: mod_base = OTHER; note = 2'-O-methyl-guanosine
ttacgaagagcagttaggcggg

SEQ ID NO: 359 - RNA, 22 nt, synthetic construct
  source 1..22: mol_type = other RNA
  modified_base 1: mod_base = OTHER; note = 2'-O-methyl-uridine with phosphorothioate linkage
  modified_base 2: mod_base = OTHER; note = 2'-fluoro-uridine with phosphorothioate linkage
  modified_base 3: mod_base = OTHER; note = 2'-fluoro-adenosine
  modified_base 4: mod_base = OTHER; note = 2'-O-methyl-guanosine
  modified_base 5: mod_base = OTHER; note = 2'-fluoro-uridine
  modified_base 6: mod_base = OTHER; note = 2'-O-methyl-cytidine
  modified_base 7: mod_base = OTHER; note = 2'-fluoro-uridine
  modified_base 8: mod_base = OTHER; note = 2'-O-methyl-uridine
  modified_base 9: mod_base = OTHER; note = 2'-O-methyl-cytidine
  modified_base 10: mod_base = OTHER; note = 2'-fluoro-uridine
  modified_base 11: mod_base = OTHER; note = 2'-O-methyl-uridine
  modified_base 12: mod_base = OTHER; note = 2'-O-methyl-adenosine
  modified_base 13: mod_base = OTHER; note = 2'-O-methyl-adenosine
  modified_base 14: mod_base = OTHER; note = 2'-fluoro-uridine
  modified_base 15: mod_base = OTHER; note = 2'-O-methyl-adenosine
  modified_base 16: mod_base = OTHER; note = 2'-fluoro-cytidine
  modified_base 17: mod_base = OTHER; note = 2'-O-methyl-guanosine
  modified_base 18: mod_base = OTHER; note = 2'-O-methyl-adenosine
  modified_base 19: mod_base = OTHER; note = 2'-O-methyl-adenosine
  modified_base 20: mod_base = OTHER; note = 2'-O-methyl-guanosine with phosphorothioate linkage
  modified_base 21: mod_base = OTHER; note = 2'-O-methyl-adenosine with phosphorothioate linkage
  modified_base 22: mod_base = OTHER; note = 2'-O-methyl-guanosine
ttagtcttcttaatacgaagag

SEQ ID NO: 360 - RNA, 22 nt, synthetic construct
  source 1..22: mol_type = other RNA
  modified_base 1: mod_base = OTHER; note = 2'-O-methyl-uridine with phosphorothioate linkage
  modified_base 2: mod_base = OTHER; note = 2'-fluoro-adenosine with phosphorothioate linkage
  modified_base 3: mod_base = OTHER; note = 2'-fluoro-adenosine
  modified_base 4: mod_base = OTHER; note = 2'-O-methyl-guanosine
  modified_base 5: mod_base = OTHER; note = 2'-fluoro-uridine
  modified_base 6: mod_base = OTHER; note = 2'-O-methyl-uridine
  modified_base 7: mod_base = OTHER; note = 2'-fluoro-guanosine
  modified_base 8: mod_base = OTHER; note = 2'-O-methyl-adenosine
  modified_base 9: mod_base = OTHER; note = 2'-O-methyl-guanosine
  modified_base 10: mod_base = OTHER; note = 2'-fluoro-adenosine
  modified_base 11: mod_base = OTHER; note = 2'-O-methyl-uridine
  modified_base 12: mod_base = OTHER; note = 2'-O-methyl-adenosine
  modified_base 13: mod_base = OTHER; note = 2'-O-methyl-uridine
  modified_base 14: mod_base = OTHER; note = 2'-fluoro-adenosine
  modified_base 15: mod_base = OTHER; note = 2'-O-methyl-guanosine
  modified_base 16: mod_base = OTHER; note = 2'-fluoro-uridine
  modified_base 17: mod_base = OTHER; note = 2'-O-methyl-cytidine
  modified_base 18: mod_base = OTHER; note = 2'-O-methyl-uridine
  modified_base 19: mod_base = OTHER; note = 2'-O-methyl-uridine
  modified_base 20: mod_base = OTHER; note = 2'-O-methyl-cytidine with phosphorothioate linkage
  modified_base 21: mod_base = OTHER; note = 2'-O-methyl-uridine with phosphorothioate linkage
  modified_base 22: mod_base = OTHER; note = 2'-O-methyl-uridine
taagttgagatatagtcttctt

SEQ ID NO: 361 - RNA, 22 nt, synthetic construct
  source 1..22: mol_type = other RNA
  modified_base 1: mod_base = OTHER; note = 2'-O-methyl-uridine with phosphorothioate linkage
  modified_base 2: mod_base = OTHER; note = 2'-fluoro-adenosine with phosphorothioate linkage
  modified_base 3: mod_base = OTHER; note = 2'-fluoro-cytidine
  modified_base 4: mod_base = OTHER; note = 2'-O-methyl-adenosine
  modified_base 5: mod_base = OTHER; note = 2'-fluoro-adenosine
  modified_base 6: mod_base = OTHER; note = 2'-O-methyl-adenosine
  modified_base 7: mod_base = OTHER; note = 2'-fluoro-guanosine
  modified_base 8: mod_base = OTHER; note = 2'-O-methyl-uridine
  modified_base 9: mod_base = OTHER; note = 2'-O-methyl-uridine
  modified_base 10: mod_base = OTHER; note = 2'-fluoro-guanosine
  modified_base 11: mod_base = OTHER; note = 2'-O-methyl-adenosine
  modified_base 12: mod_base = OTHER; note = 2'-O-methyl-guanosine
  modified_base 13: mod_base = OTHER; note = 2'-O-methyl-adenosine
  modified_base 14: mod_base = OTHER; note = 2'-fluoro-uridine
  modified_base 15: mod_base = OTHER; note = 2'-O-methyl-adenosine
  modified_base 16: mod_base = OTHER; note = 2'-fluoro-uridine
  modified_base 17: mod_base = OTHER; note = 2'-O-methyl-adenosine
  modified_base 18: mod_base = OTHER; note = 2'-O-methyl-guanosine
  modified_base 19: mod_base = OTHER; note = 2'-O-methyl-uridine
  modified_base 20: mod_base = OTHER; note = 2'-O-methyl-cytidine with phosphorothioate linkage
  modified_base 21: mod_base = OTHER; note = 2'-O-methyl-uridine with phosphorothioate linkage
  modified_base 22: mod_base = OTHER; note = 2'-O-methyl-uridine
tacaaagttgagatatagtctt

SEQ ID NO: 362 - RNA, 22 nt, synthetic construct
  source 1..22: mol_type = other RNA
  modified_base 1: mod_base = OTHER; note = 2'-O-methyl-uridine with phosphorothioate linkage
  modified_base 2: mod_base = OTHER; note = 2'-fluoro-adenosine with phosphorothioate linkage
  modified_base 3: mod_base = OTHER; note = 2'-fluoro-cytidine
  modified_base 4: mod_base = OTHER; note = 2'-O-methyl-adenosine
  modified_base 5: mod_base = OTHER; note = 2'-fluoro-cytidine
  modified_base 6: mod_base = OTHER; note = 2'-O-methyl-adenosine
  modified_base 7: mod_base = OTHER; note = 2'-fluoro-adenosine
  modified_base 8: mod_base = OTHER; note = 2'-O-methyl-adenosine
  modified_base 9: mod_base = OTHER; note = 2'-O-methyl-guanosine
  modified_base 10: mod_base = OTHER; note = 2'-fluoro-uridine
  modified_base 11: mod_base = OTHER; note = 2'-O-methyl-uridine
  modified_base 12: mod_base = OTHER; note = 2'-O-methyl-guanosine
  modified_base 13: mod_base = OTHER; note = 2'-O-methyl-adenosine
  modified_base 14: mod_base = OTHER; note = 2'-fluoro-guanosine
  modified_base 15: mod_base = OTHER; note = 2'-O-methyl-adenosine
  modified_base 16: mod_base = OTHER; note = 2'-fluoro-uridine
  modified_base 17: mod_base = OTHER; note = 2'-O-methyl-adenosine
  modified_base 18: mod_base = OTHER; note = 2'-O-methyl-uridine
  modified_base 19: mod_base = OTHER; note = 2'-O-methyl-adenosine
  modified_base 20: mod_base = OTHER; note = 2'-O-methyl-guanosine with phosphorothioate linkage
  modified_base 21: mod_base = OTHER; note = 2'-O-methyl-uridine with phosphorothioate linkage
  modified_base 22: mod_base = OTHER; note = 2'-O-methyl-cytidine
tacacaaagttgagatatagtc

SEQ ID NO: 363 - RNA, 22 nt, synthetic construct
  source 1..22: mol_type = other RNA
  modified_base 1: mod_base = OTHER; note = 2'-O-methyl-uridine with phosphorothioate linkage
  modified_base 2: mod_base = OTHER; note = 2'-fluoro-adenosine with phosphorothioate linkage
  modified_base 3: mod_base = OTHER; note = 2'-fluoro-uridine
  modified_base 4: mod_base = OTHER; note = 2'-O-methyl-cytidine
  modified_base 5: mod_base = OTHER; note = 2'-fluoro-adenosine
  modified_base 6: mod_base = OTHER; note = 2'-O-methyl-uridine
  modified_base 7: mod_base = OTHER; note = 2'-fluoro-uridine
  modified_base 8: mod_base = OTHER; note = 2'-O-methyl-adenosine
  modified_base 9: mod_base = OTHER; note = 2'-O-methyl-guanosine
  modified_base 10: mod_base = OTHER; note = 2'-fluoro-guanosine
  modified_base 11: mod_base = OTHER; note = 2'-O-methyl-cytidine
  modified_base 12: mod_base = OTHER; note = 2'-O-methyl-uridine
  modified_base 13: mod_base = OTHER; note = 2'-O-methyl-uridine
  modified_base 14: mod_base = OTHER; note = 2'-fluoro-uridine
  modified_base 15: mod_base = OTHER; note = 2'-O-methyl-guanosine
  modified_base 16: mod_base = OTHER; note = 2'-fluoro-cytidine
  modified_base 17: mod_base = OTHER; note = 2'-O-methyl-adenosine
  modified_base 18: mod_base = OTHER; note = 2'-O-methyl-guanosine
  modified_base 19: mod_base = OTHER; note = 2'-O-methyl-uridine
  modified_base 20: mod_base = OTHER; note = 2'-O-methyl-cytidine with phosphorothioate linkage
  modified_base 21: mod_base = OTHER; note = 2'-O-methyl-uridine with phosphorothioate linkage
  modified_base 22: mod_base = OTHER; note = 2'-O-methyl-uridine
tatcattaggctttgcagtctt

SEQ ID NO: 364 - RNA, 22 nt, synthetic construct
  source 1..22: mol_type = other RNA
  modified_base 1: mod_base = OTHER; note = 2'-O-methyl-uridine with phosphorothioate linkage
  modified_base 2: mod_base = OTHER; note = 2'-fluoro-adenosine with phosphorothioate linkage
  modified_base 3: mod_base = OTHER; note = 2'-fluoro-adenosine
  modified_base 4: mod_base = OTHER; note = 2'-O-methyl-uridine
  modified_base 5: mod_base = OTHER; note = 2'-fluoro-adenosine
  modified_base 6: mod_base = OTHER; note = 2'-O-methyl-cytidine
  modified_base 7: mod_base = OTHER; note = 2'-fluoro-uridine
  modified_base 8: mod_base = OTHER; note = 2'-O-methyl-guanosine
  modified_base 9: mod_base = OTHER; note = 2'-O-methyl-uridine
  modified_base 10: mod_base = OTHER; note = 2'-fluoro-adenosine
  modified_base 11: mod_base = OTHER; note = 2'-O-methyl-cytidine
  modified_base 12: mod_base = OTHER; note = 2'-O-methyl-uridine
  modified_base 13: mod_base = OTHER; note = 2'-O-methyl-guanosine
  modified_base 14: mod_base = OTHER; note = 2'-fluoro-uridine
  modified_base 15: mod_base = OTHER; note = 2'-O-methyl-cytidine
  modified_base 16: mod_base = OTHER; note = 2'-fluoro-uridine
  modified_base 17: mod_base = OTHER; note = 2'-O-methyl-uridine
  modified_base 18: mod_base = OTHER; note = 2'-O-methyl-adenosine
  modified_base 19: mod_base = OTHER; note = 2'-O-methyl-uridine
  modified_base 20: mod_base = OTHER; note = 2'-O-methyl-cytidine with phosphorothioate linkage
  modified_base 21: mod_base = OTHER; note = 2'-O-methyl-uridine with phosphorothioate linkage
  modified_base 22: mod_base = OTHER; note = 2'-O-methyl-uridine
taatactgtactgtcttatctt

SEQ ID NO: 365 - RNA, 22 nt, synthetic construct
  source 1..22: mol_type = other RNA
  modified_base 1: mod_base = OTHER; note = 2'-O-methyl-uridine with phosphorothioate linkage
  modified_base 2: mod_base = OTHER; note = 2'-fluoro-adenosine with phosphorothioate linkage
  modified_base 3: mod_base = OTHER; note = 2'-fluoro-cytidine
  modified_base 4: mod_base = OTHER; note = 2'-O-methyl-uridine
  modified_base 5: mod_base = OTHER; note = 2'-fluoro-uridine
  modified_base 6: mod_base = OTHER; note = 2'-O-methyl-adenosine
  modified_base 7: mod_base = OTHER; note = 2'-fluoro-adenosine
  modified_base 8: mod_base = OTHER; note = 2'-O-methyl-adenosine
  modified_base 9: mod_base = OTHER; note = 2'-O-methyl-uridine
  modified_base 10: mod_base = OTHER; note = 2'-fluoro-adenosine
  modified_base 11: mod_base = OTHER; note = 2'-O-methyl-cytidine
  modified_base 12: mod_base = OTHER; note = 2'-O-methyl-uridine
  modified_base 13: mod_base = OTHER; note = 2'-O-methyl-guanosine
  modified_base 14: mod_base = OTHER; note = 2'-fluoro-uridine
  modified_base 15: mod_base = OTHER; note = 2'-O-methyl-adenosine
  modified_base 16: mod_base = OTHER; note = 2'-fluoro-cytidine
  modified_base 17: mod_base = OTHER; note = 2'-O-methyl-uridine
  modified_base 18: mod_base = OTHER; note = 2'-O-methyl-guanosine
  modified_base 19: mod_base = OTHER; note = 2'-O-methyl-uridine
  modified_base 20: mod_base = OTHER; note = 2'-O-methyl-cytidine with phosphorothioate linkage
  modified_base 21: mod_base = OTHER; note = 2'-O-methyl-uridine with phosphorothioate linkage
  modified_base 22: mod_base = OTHER; note = 2'-O-methyl-uridine
tacttaaatactgtactgtctt

SEQ ID NO: 366 - RNA, 22 nt, synthetic construct
  source 1..22: mol_type = other RNA
  modified_base 1: mod_base = OTHER; note = 2'-O-methyl-uridine with phosphorothioate linkage
  modified_base 2: mod_base = OTHER; note = 2'-fluoro-adenosine with phosphorothioate linkage
  modified_base 3: mod_base = OTHER; note = 2'-fluoro-adenosine
  modified_base 4: mod_base = OTHER; note = 2'-O-methyl-guanosine
  modified_base 5: mod_base = OTHER; note = 2'-fluoro-uridine
  modified_base 6: mod_base = OTHER; note = 2'-O-methyl-cytidine
  modified_base 7: mod_base = OTHER; note = 2'-fluoro-adenosine
  modified_base 8: mod_base = OTHER; note = 2'-O-methyl-adenosine
  modified_base 9: mod_base = OTHER; note = 2'-O-methyl-cytidine
  modified_base 10: mod_base = OTHER; note = 2'-fluoro-uridine
  modified_base 11: mod_base = OTHER; note = 2'-O-methyl-cytidine
  modified_base 12: mod_base = OTHER; note = 2'-O-methyl-cytidine
  modified_base 13: mod_base = OTHER; note = 2'-O-methyl-uridine
  modified_base 14: mod_base = OTHER; note = 2'-fluoro-guanosine
  modified_base 15: mod_base = OTHER; note = 2'-O-methyl-cytidine
  modified_base 16: mod_base = OTHER; note = 2'-fluoro-cytidine
  modified_base 17: mod_base = OTHER; note = 2'-O-methyl-cytidine
  modified_base 18: mod_base = OTHER; note = 2'-O-methyl-adenosine
  modified_base 19: mod_base = OTHER; note = 2'-O-methyl-uridine
  modified_base 20: mod_base = OTHER; note = 2'-O-methyl-guanosine with phosphorothioate linkage
  modified_base 21: mod_base = OTHER; note = 2'-O-methyl-cytidine with phosphorothioate linkage
  modified_base 22: mod_base = OTHER; note = 2'-O-methyl-uridine
taagtcaactcctgcccatgct

SEQ ID NO: 367 - RNA, 22 nt, synthetic construct
  source 1..22: mol_type = other RNA
  modified_base 1: mod_base = OTHER; note = 2'-O-methyl-uridine with phosphorothioate linkage
  modified_base 2: mod_base = OTHER; note = 2'-fluoro-adenosine with phosphorothioate linkage
  modified_base 3: mod_base = OTHER; note = 2'-fluoro-uridine
  modified_base 4: mod_base = OTHER; note = 2'-O-methyl-guanosine
  modified_base 5: mod_base = OTHER; note = 2'-fluoro-adenosine
  modified_base 6: mod_base = OTHER; note = 2'-O-methyl-adenosine
  modified_base 7: mod_base = OTHER; note = 2'-fluoro-guanosine
  modified_base 8: mod_base = OTHER; note = 2'-O-methyl-uridine
  modified_base 9: mod_base = OTHER; note = 2'-O-methyl-cytidine
  modified_base 10: mod_base = OTHER; note = 2'-fluoro-adenosine
  modified_base 11: mod_base = OTHER; note = 2'-O-methyl-adenosine
  modified_base 12: mod_base = OTHER; note = 2'-O-methyl-cytidine
  modified_base 13: mod_base = OTHER; note = 2'-O-methyl-uridine
  modified_base 14: mod_base = OTHER; note = 2'-fluoro-cytidine
  modified_base 15: mod_base = OTHER; note = 2'-O-methyl-cytidine
  modified_base 16: mod_base = OTHER; note = 2'-fluoro-uridine
  modified_base 17: mod_base = OTHER; note = 2'-O-methyl-guanosine
  modified_base 18: mod_base = OTHER; note = 2'-O-methyl-cytidine
  modified_base 19: mod_base = OTHER; note = 2'-O-methyl-cytidine
  modified_base 20: mod_base = OTHER; note = 2'-O-methyl-cytidine with phosphorothioate linkage
  modified_base 21: mod_base = OTHER; note = 2'-O-methyl-adenosine with phosphorothioate linkage
  modified_base 22: mod_base = OTHER; note = 2'-O-methyl-uridine
tatgaagtcaactcctgcccat

SEQ ID NO: 368 - RNA, 22 nt, synthetic construct
  source 1..22: mol_type = other RNA
  modified_base 1: mod_base = OTHER; note = 2'-O-methyl-uridine with phosphorothioate linkage
  modified_base 2: mod_base = OTHER; note = 2'-fluoro-uridine with phosphorothioate linkage
  modified_base 3: mod_base = OTHER; note = 2'-fluoro-uridine
  modified_base 4: mod_base = OTHER; note = 2'-O-methyl-uridine
  modified_base 5: mod_base = OTHER; note = 2'-fluoro-adenosine
  modified_base 6: mod_base = OTHER; note = 2'-O-methyl-adenosine
  modified_base 7: mod_base = OTHER; note = 2'-fluoro-adenosine
  modified_base 8: mod_base = OTHER; note = 2'-O-methyl-adenosine
  modified_base 9: mod_base = OTHER; note = 2'-O-methyl-adenosine
  modified_base 10: mod_base = OTHER; note = 2'-fluoro-guanosine
  modified_base 11: mod_base = OTHER; note = 2'-O-methyl-uridine
  modified_base 12: mod_base = OTHER; note = 2'-O-methyl-cytidine
  modified_base 13: mod_base = OTHER; note = 2'-O-methyl-cytidine
  modified_base 14: mod_base = OTHER; note = 2'-fluoro-uridine
  modified_base 15: mod_base = OTHER; note = 2'-O-methyl-guanosine
  modified_base 16: mod_base = OTHER; note = 2'-fluoro-cytidine
  modified_base 17: mod_base = OTHER; note = 2'-O-methyl-uridine
  modified_base 18: mod_base = OTHER; note = 2'-O-methyl-adenosine
  modified_base 19: mod_base = OTHER; note = 2'-O-methyl-adenosine
  modified_base 20: mod_base = OTHER; note = 2'-O-methyl-cytidine with phosphorothioate linkage
  modified_base 21: mod_base = OTHER; note = 2'-O-methyl-uridine with phosphorothioate linkage
  modified_base 22: mod_base = OTHER; note = 2'-O-methyl-uridine
ttttaaaaagtcctgctaactt

SEQ ID NO: 369 - RNA, 22 nt, synthetic construct
  source 1..22: mol_type = other RNA
  modified_base 1: mod_base = OTHER; note = 2'-O-methyl-uridine with phosphorothioate linkage
  modified_base 2: mod_base = OTHER; note = 2'-fluoro-adenosine with phosphorothioate linkage
  modified_base 3: mod_base = OTHER; note = 2'-fluoro-adenosine
  modified_base 4: mod_base = OTHER; note = 2'-O-methyl-cytidine
  modified_base 5: mod_base = OTHER; note = 2'-fluoro-adenosine
  modified_base 6: mod_base = OTHER; note = 2'-O-methyl-adenosine
  modified_base 7: mod_base = OTHER; note = 2'-fluoro-guanosine
  modified_base 8: mod_base = OTHER; note = 2'-O-methyl-uridine
  modified_base 9: mod_base = OTHER; note = 2'-O-methyl-uridine
  modified_base 10: mod_base = OTHER; note = 2'-fluoro-uridine
  modified_base 11: mod_base = OTHER; note = 2'-O-methyl-adenosine
  modified_base 12: mod_base = OTHER; note = 2'-O-methyl-guanosine
  modified_base 13: mod_base = OTHER; note = 2'-O-methyl-uridine
  modified_base 14: mod_base = OTHER; note = 2'-fluoro-guanosine
  modified_base 15: mod_base = OTHER; note = 2'-O-methyl-guanosine
  modified_base 16: mod_base = OTHER; note = 2'-fluoro-uridine
  modified_base 17: mod_base = OTHER; note = 2'-O-methyl-uridine
  modified_base 18: mod_base = OTHER; note = 2'-O-methyl-cytidine
  modified_base 19: mod_base = OTHER; note = 2'-O-methyl-adenosine
  modified_base 20: mod_base = OTHER; note = 2'-O-methyl-guanosine with phosphorothioate linkage
  modified_base 21: mod_base = OTHER; note = 2'-O-methyl-guanosine with phosphorothioate linkage
  modified_base 22: mod_base = OTHER; note = 2'-O-methyl-guanosine
taacaagtttagtggttcaggg

SEQ ID NO: 370 - RNA, 22 nt, synthetic construct
  source 1..22: mol_type = other RNA
  modified_base 1: mod_base = OTHER; note = 2'-O-methyl-uridine with phosphorothioate linkage
  modified_base 2: mod_base = OTHER; note = 2'-fluoro-adenosine with phosphorothioate linkage
  modified_base 3: mod_base = OTHER; note = 2'-fluoro-guanosine
  modified_base 4: mod_base = OTHER; note = 2'-O-methyl-adenosine
  modified_base 5: mod_base = OTHER; note = 2'-fluoro-adenosine
  modified_base 6: mod_base = OTHER; note = 2'-O-methyl-adenosine
  modified_base 7: mod_base = OTHER; note = 2'-fluoro-adenosine
  modified_base 8: mod_base = OTHER; note = 2'-O-methyl-guanosine
  modified_base 9: mod_base = OTHER; note = 2'-O-methyl-cytidine
  modified_base 10: mod_base = OTHER; note = 2'-fluoro-adenosine
  modified_base 11: mod_base = OTHER; note = 2'-O-methyl-cytidine
  modified_base 12: mod_base = OTHER; note = 2'-O-methyl-uridine
  modified_base 13: mod_base = OTHER; note = 2'-O-methyl-adenosine
  modified_base 14: mod_base = OTHER; note = 2'-fluoro-uridine
  modified_base 15: mod_base = OTHER; note = 2'-O-methyl-uridine
  modified_base 16: mod_base = OTHER; note = 2'-fluoro-cytidine
  modified_base 17: mod_base = OTHER; note = 2'-O-methyl-adenosine
  modified_base 18: mod_base = OTHER; note = 2'-O-methyl-adenosine
  modified_base 19: mod_base = OTHER; note = 2'-O-methyl-guanosine
  modified_base 20: mod_base = OTHER; note = 2'-O-methyl-guanosine with phosphorothioate linkage
  modified_base 21: mod_base = OTHER; note = 2'-O-methyl-guanosine with phosphorothioate linkage
  modified_base 22: mod_base = OTHER; note = 2'-O-methyl-adenosine
tagaaaagcactattcaaggga

SEQ ID NO: 371 - RNA, 22 nt, synthetic construct
  source 1..22: mol_type = other RNA
  modified_base 1: mod_base = OTHER; note = 2'-O-methyl-uridine with phosphorothioate linkage
  modified_base 2: mod_base = OTHER; note = 2'-fluoro-adenosine with phosphorothioate linkage
  modified_base 3: mod_base = OTHER; note = 2'-fluoro-uridine
  modified_base 4: mod_base = OTHER; note = 2'-O-methyl-guanosine
  modified_base 5: mod_base = OTHER; note = 2'-fluoro-uridine
  modified_base 6: mod_base = OTHER; note = 2'-O-methyl-cytidine
  modified_base 7: mod_base = OTHER; note = 2'-fluoro-adenosine
  modified_base 8: mod_base = OTHER; note = 2'-O-methyl-adenosine
  modified_base 9: mod_base = OTHER; note = 2'-O-methyl-cytidine
  modified_base 10: mod_base = OTHER; note = 2'-fluoro-adenosine
  modified_base 11: mod_base = OTHER; note = 2'-O-methyl-guanosine
  modified_base 12: mod_base = OTHER; note = 2'-O-methyl-adenosine
  modified_base 13: mod_base = OTHER; note = 2'-O-methyl-uridine
  modified_base 14: mod_base = OTHER; note = 2'-fluoro-adenosine
  modified_base 15: mod_base = OTHER; note = 2'-O-methyl-uridine
  modified_base 16: mod_base = OTHER; note = 2'-fluoro-guanosine
  modified_base 17: mod_base = OTHER; note = 2'-O-methyl-guanosine
  modified_base 18: mod_base = OTHER; note = 2'-O-methyl-uridine
  modified_base 19: mod_base = OTHER; note = 2'-O-methyl-uridine
  modified_base 20: mod_base = OTHER; note = 2'-O-methyl-cytidine with phosphorothioate linkage
  modified_base 21: mod_base = OTHER; note = 2'-O-methyl-uridine with phosphorothioate linkage
  modified_base 22: mod_base = OTHER; note = 2'-O-methyl-guanosine
tatgtcaacagatatggttctg

SEQ ID NO: 372 - RNA, 22 nt, synthetic construct
  source 1..22: mol_type = other RNA
  modified_base 1: mod_base = OTHER; note = 2'-O-methyl-uridine with phosphorothioate linkage
  modified_base 2: mod_base = OTHER; note = 2'-fluoro-adenosine with phosphorothioate linkage
  modified_base 3: mod_base = OTHER; note = 2'-fluoro-adenosine
  modified_base 4: mod_base = OTHER; note = 2'-O-methyl-adenosine
  modified_base 5: mod_base = OTHER; note = 2'-fluoro-adenosine
  modified_base 6: mod_base = OTHER; note = 2'-O-methyl-uridine
  modified_base 7: mod_base = OTHER; note = 2'-fluoro-guanosine
  modified_base 8: mod_base = OTHER; note = 2'-O-methyl-uridine
  modified_base 9: mod_base = OTHER; note = 2'-O-methyl-cytidine
  modified_base 10: mod_base = OTHER; note = 2'-fluoro-adenosine
  modified_base 11: mod_base = OTHER; note = 2'-O-methyl-adenosine
  modified_base 12: mod_base = OTHER; note = 2'-O-methyl-cytidine
  modified_base 13: mod_base = OTHER; note = 2'-O-methyl-adenosine
  modified_base 14: mod_base = OTHER; note = 2'-fluoro-guanosine
  modified_base 15: mod_base = OTHER; note = 2'-O-methyl-adenosine
  modified_base 16: mod_base = OTHER; note = 2'-fluoro-uridine
  modified_base 17: mod_base = OTHER; note = 2'-O-methyl-adenosine
  modified_base 18: mod_base = OTHER; note = 2'-O-methyl-uridine
  modified_base 19: mod_base = OTHER; note = 2'-O-methyl-guanosine
  modified_base 20: mod_base = OTHER; note = 2'-O-methyl-guanosine with phosphorothioate linkage
  modified_base 21: mod_base = OTHER; note = 2'-O-methyl-uridine with phosphorothioate linkage
  modified_base 22: mod_base = OTHER; note = 2'-O-methyl-uridine
taaaatgtcaacagatatggtt

SEQ ID NO: 373 - RNA, 22 nt, synthetic construct
  source 1..22: mol_type = other RNA
  modified_base 1: mod_base = OTHER; note = 2'-O-methyl-uridine with phosphorothioate linkage
  modified_base 2: mod_base = OTHER; note = 2'-fluoro-adenosine with phosphorothioate linkage
  modified_base 3: mod_base = OTHER; note = 2'-fluoro-adenosine
  modified_base 4: mod_base = OTHER; note = 2'-O-methyl-guanosine
  modified_base 5: mod_base = OTHER; note = 2'-fluoro-guanosine
  modified_base 6: mod_base = OTHER; note = 2'-O-methyl-adenosine
  modified_base 7: mod_base = OTHER; note = 2'-fluoro-adenosine
  modified_base 8: mod_base = OTHER; note = 2'-O-methyl-adenosine
  modified_base 9: mod_base = OTHER; note = 2'-O-methyl-uridine
  modified_base 10: mod_base = OTHER; note = 2'-fluoro-adenosine
  modified_base 11: mod_base = OTHER; note = 2'-O-methyl-guanosine
  modified_base 12: mod_base = OTHER; note = 2'-O-methyl-guanosine
  modified_base 13: mod_base = OTHER; note = 2'-O-methyl-guanosine
  modified_base 14: mod_base = OTHER; note = 2'-fluoro-adenosine
  modified_base 15: mod_base = OTHER; note = 2'-O-methyl-cytidine
  modified_base 16: mod_base = OTHER; note = 2'-fluoro-cytidine
  modified_base 17: mod_base = OTHER; note = 2'-O-methyl-uridine
  modified_base 18: mod_base = OTHER; note = 2'-O-methyl-cytidine
  modified_base 19: mod_base = OTHER; note = 2'-O-methyl-uridine
  modified_base 20: mod_base = OTHER; note = 2'-O-methyl-guanosine with phosphorothioate linkage
  modified_base 21: mod_base = OTHER; note = 2'-O-methyl-adenosine with phosphorothioate linkage
  modified_base 22: mod_base = OTHER; note = 2'-O-methyl-adenosine
taaggaaatagggacctctgaa

SEQ ID NO: 374 - RNA, 22 nt, synthetic construct
  source 1..22: mol_type = other RNA
  modified_base 1: mod_base = OTHER; note = 2'-O-methyl-uridine with phosphorothioate linkage
  modified_base 2: mod_base = OTHER; note = 2'-fluoro-uridine with phosphorothioate linkage
  modified_base 3: mod_base = OTHER; note = 2'-fluoro-adenosine
  modified_base 4: mod_base = OTHER; note = 2'-O-methyl-cytidine
  modified_base 5: mod_base = OTHER; note = 2'-fluoro-adenosine
  modified_base 6: mod_base = OTHER; note = 2'-O-methyl-adenosine
  modified_base 7: mod_base = OTHER; note = 2'-fluoro-adenosine
  modified_base 8: mod_base = OTHER; note = 2'-O-methyl-guanosine
  modified_base 9: mod_base = OTHER; note = 2'-O-methyl-guanosine
  modified_base 10: mod_base = OTHER; note = 2'-fluoro-adenosine
  modified_base 11: mod_base = OTHER; note = 2'-O-methyl-adenosine
  modified_base 12: mod_base = OTHER; note = 2'-O-methyl-adenosine
  modified_base 13: mod_base = OTHER; note = 2'-O-methyl-uridine
  modified_base 14: mod_base = OTHER; note = 2'-fluoro-adenosine
  modified_base 15: mod_base = OTHER; note = 2'-O-methyl-guanosine
  modified_base 16: mod_base = OTHER; note = 2'-fluoro-guanosine
  modified_base 17: mod_base = OTHER; note = 2'-O-methyl-guanosine
  modified_base 18: mod_base = OTHER; note = 2'-O-methyl-adenosine
  modified_base 19: mod_base = OTHER; note = 2'-O-methyl-cytidine
  modified_base 20: mod_base = OTHER; note = 2'-O-methyl-cytidine with phosphorothioate linkage
  modified_base 21: mod_base = OTHER; note = 2'-O-methyl-uridine with phosphorothioate linkage
  modified_base 22: mod_base = OTHER; note = 2'-O-methyl-cytidine
ttacaaaggaaatagggacctc

SEQ ID NO: 375 - RNA, 22 nt, synthetic construct
  source 1..22: mol_type = other RNA
  modified_base 1: mod_base = OTHER; note = 2'-O-methyl-uridine with phosphorothioate linkage
  modified_base 2: mod_base = OTHER; note = 2'-fluoro-adenosine with phosphorothioate linkage
  modified_base 3: mod_base = OTHER; note = 2'-fluoro-uridine
  modified_base 4: mod_base = OTHER; note = 2'-O-methyl-guanosine
  modified_base 5: mod_base = OTHER; note = 2'-fluoro-uridine
  modified_base 6: mod_base = OTHER; note = 2'-O-methyl-adenosine
  modified_base 7: mod_base = OTHER; note = 2'-fluoro-cytidine
  modified_base 8: mod_base = OTHER; note = 2'-O-methyl-adenosine
  modified_base 9: mod_base = OTHER; note = 2'-O-methyl-adenosine
  modified_base 10: mod_base = OTHER; note = 2'-fluoro-adenosine
  modified_base 11: mod_base = OTHER; note = 2'-O-methyl-guanosine
  modified_base 12: mod_base = OTHER; note = 2'-O-methyl-guanosine
  modified_base 13: mod_base = OTHER; note = 2'-O-methyl-adenosine
  modified_base 14: mod_base = OTHER; note = 2'-fluoro-adenosine
  modified_base 15: mod_base = OTHER; note = 2'-O-methyl-adenosine
  modified_base 16: mod_base = OTHER; note = 2'-fluoro-uridine
  modified_base 17: mod_base = OTHER; note = 2'-O-methyl-adenosine
  modified_base 18: mod_base = OTHER; note = 2'-O-methyl-guanosine
  modified_base 19: mod_base = OTHER; note = 2'-O-methyl-guanosine
  modified_base 20: mod_base = OTHER; note = 2'-O-methyl-guanosine with phosphorothioate linkage
  modified_base 21: mod_base = OTHER; note = 2'-O-methyl-adenosine with phosphorothioate linkage
  modified_base 22: mod_base = OTHER; note = 2'-O-methyl-cytidine
tatgtacaaaggaaatagggac

SEQ ID NO: 376 - RNA, 22 nt, synthetic construct
  source 1..22: mol_type = other RNA
  modified_base 1: mod_base = OTHER; note = 2'-O-methyl-uridine with phosphorothioate linkage
  modified_base 2: mod_base = OTHER; note = 2'-fluoro-uridine with phosphorothioate linkage
  modified_base 3: mod_base = OTHER; note = 2'-fluoro-adenosine
  modified_base 4: mod_base = OTHER; note = 2'-O-methyl-uridine
  modified_base 5: mod_base = OTHER; note = 2'-fluoro-guanosine
  modified_base 6: mod_base = OTHER; note = 2'-O-methyl-uridine
  modified_base 7: mod_base = OTHER; note = 2'-fluoro-adenosine
  modified_base 8: mod_base = OTHER; note = 2'-O-methyl-cytidine
  modified_base 9: mod_base = OTHER; note = 2'-O-methyl-adenosine
  modified_base 10: mod_base = OTHER; note = 2'-fluoro-adenosine
  modified_base 11: mod_base = OTHER; note = 2'-O-methyl-adenosine
  modified_base 12: mod_base = OTHER; note = 2'-O-methyl-guanosine
  modified_base 13: mod_base = OTHER; note = 2'-O-methyl-guanosine
  modified_base 14: mod_base = OTHER; note = 2'-fluoro-adenosine
  modified_base 15: mod_base = OTHER; note = 2'-O-methyl-adenosine
  modified_base 16: mod_base = OTHER; note = 2'-fluoro-adenosine
  modified_base 17: mod_base = OTHER; note = 2'-O-methyl-uridine
  modified_base 18: mod_base = OTHER; note = 2'-O-methyl-adenosine
  modified_base 19: mod_base = OTHER; note = 2'-O-methyl-guanosine
  modified_base 20: mod_base = OTHER; note = 2'-O-methyl-guanosine with phosphorothioate linkage
  modified_base 21: mod_base = OTHER; note = 2'-O-methyl-guanosine with phosphorothioate linkage
  modified_base 22: mod_base = OTHER; note = 2'-O-methyl-adenosine
ttatgtacaaaggaaataggga

SEQ ID NO: 377 - RNA, 22 nt, synthetic construct
  source 1..22: mol_type = other RNA
  modified_base 1: mod_base = OTHER; note = 2'-O-methyl-uridine with phosphorothioate linkage
  modified_base 2: mod_base = OTHER; note = 2'-fluoro-uridine with phosphorothioate linkage
  modified_base 3: mod_base = OTHER; note = 2'-fluoro-guanosine
  modified_base 4: mod_base = OTHER; note = 2'-O-methyl-uridine
  modified_base 5: mod_base = OTHER; note = 2'-fluoro-cytidine
  modified_base 6: mod_base = OTHER; note = 2'-O-methyl-uridine
  modified_base 7: mod_base = OTHER; note = 2'-fluoro-uridine
  modified_base 8: mod_base = OTHER; note = 2'-O-methyl-uridine
  modified_base 9: mod_base = OTHER; note = 2'-O-methyl-uridine
  modified_base 10: mod_base = OTHER; note = 2'-fluoro-cytidine
  modified_base 11: mod_base = OTHER; note = 2'-O-methyl-uridine
  modified_base 12: mod_base = OTHER; note = 2'-O-methyl-uridine
  modified_base 13: mod_base = OTHER; note = 2'-O-methyl-uridine
  modified_base 14: mod_base = OTHER; note = 2'-fluoro-cytidine
  modified_base 15: mod_base = OTHER; note = 2'-O-methyl-uridine
  modified_base 16: mod_base = OTHER; note = 2'-fluoro-adenosine
  modified_base 17: mod_base = OTHER; note = 2'-O-methyl-adenosine
  modified_base 18: mod_base = OTHER; note = 2'-O-methyl-guanosine
  modified_base 19: mod_base = OTHER; note = 2'-O-methyl-uridine
  modified_base 20: mod_base = OTHER; note = 2'-O-methyl-guanosine with phosphorothioate linkage
  modified_base 21: mod_base = OTHER; note = 2'-O-methyl-uridine with phosphorothioate linkage
  modified_base 22: mod_base = OTHER; note = 2'-O-methyl-guanosine
ttgtcttttctttctaagtgtg

SEQ ID NO: 378 - RNA, 22 nt, synthetic construct
  source 1..22: mol_type = other RNA
  modified_base 1: mod_base = OTHER; note = 2'-O-methyl-uridine with phosphorothioate linkage
  modified_base 2: mod_base = OTHER; note = 2'-fluoro-uridine with phosphorothioate linkage
  modified_base 3: mod_base = OTHER; note = 2'-fluoro-uridine
  modified_base 4: mod_base = OTHER; note = 2'-O-methyl-cytidine
  modified_base 5: mod_base = OTHER; note = 2'-fluoro-adenosine
  modified_base 6: mod_base = OTHER; note = 2'-O-methyl-uridine
  modified_base 7: mod_base = OTHER; note = 2'-fluoro-uridine
  modified_base 8: mod_base = OTHER; note = 2'-O-methyl-adenosine
  modified_base 9: mod_base = OTHER; note = 2'-O-methyl-cytidine
  modified_base 10: mod_base = OTHER; note = 2'-fluoro-uridine
  modified_base 11: mod_base = OTHER; note = 2'-O-methyl-cytidine
  modified_base 12: mod_base = OTHER; note = 2'-O-methyl-uridine
  modified_base 13: mod_base = OTHER; note = 2'-O-methyl-guanosine
  modified_base 14: mod_base = OTHER; note = 2'-fluoro-uridine
  modified_base 15: mod_base = OTHER; note = 2'-O-methyl-guanosine
  modified_base 16: mod_base = OTHER; note = 2'-fluoro-uridine
  modified_base 17: mod_base = OTHER; note = 2'-O-methyl-cytidine
  modified_base 18: mod_base = OTHER; note = 2'-O-methyl-cytidine
  modified_base 19: mod_base = OTHER; note = 2'-O-methyl-adenosine
  modified_base 20: mod_base = OTHER; note = 2'-O-methyl-cytidine with phosphorothioate linkage
  modified_base 21: mod_base = OTHER; note = 2'-O-methyl-adenosine with phosphorothioate linkage
  modified_base 22: mod_base = OTHER; note = 2'-O-methyl-guanosine
tttcattactctgtgtccacag

SEQ ID NO: 379 - RNA, 22 nt, synthetic construct
  source 1..22: mol_type = other RNA
  modified_base 1: mod_base = OTHER; note = 2'-O-methyl-uridine with phosphorothioate linkage
  modified_base 2: mod_base = OTHER; note = 2'-fluoro-uridine with phosphorothioate linkage
  modified_base 3: mod_base = OTHER; note = 2'-fluoro-adenosine
  modified_base 4: mod_base = OTHER; note = 2'-O-methyl-uridine
  modified_base 5: mod_base = OTHER; note = 2'-fluoro-guanosine
  modified_base 6: mod_base = OTHER; note = 2'-O-methyl-cytidine
  modified_base 7: mod_base = OTHER; note = 2'-fluoro-uridine
  modified_base 8: mod_base = OTHER; note = 2'-O-methyl-adenosine
  modified_base 9: mod_base = OTHER; note = 2'-O-methyl-adenosine
  modified_base 10: mod_base = OTHER; note = 2'-fluoro-cytidine
  modified_base 11: mod_base = OTHER; note = 2'-O-methyl-adenosine
  modified_base 12: mod_base = OTHER; note = 2'-O-methyl-uridine
  modified_base 13: mod_base = OTHER; note = 2'-O-methyl-guanosine
  modified_base 14: mod_base = OTHER; note = 2'-fluoro-uridine
  modified_base 15: mod_base = OTHER; note = 2'-O-methyl-adenosine
  modified_base 16: mod_base = OTHER; note = 2'-fluoro-cytidine
  modified_base 17: mod_base = OTHER; note = 2'-O-methyl-uridine
  modified_base 18: mod_base = OTHER; note = 2'-O-methyl-adenosine
  modified_base 19: mod_base = OTHER; note = 2'-O-methyl-uridine
  modified_base 20: mod_base = OTHER; note = 2'-O-methyl-cytidine with phosphorothioate linkage
  modified_base 21: mod_base = OTHER; note = 2'-O-methyl-adenosine with phosphorothioate linkage
  modified_base 22: mod_base = OTHER; note = 2'-O-methyl-cytidine
ttatgctaacatgtactatcac

SEQ ID NO: 380 - RNA, 22 nt, synthetic construct
  source 1..22: mol_type = other RNA
  modified_base 1: mod_base = OTHER; note = 2'-O-methyl-uridine with phosphorothioate linkage
  modified_base 2: mod_base = OTHER; note = 2'-fluoro-adenosine with phosphorothioate linkage
  modified_base 3: mod_base = OTHER; note = 2'-fluoro-uridine
  modified_base 4: mod_base = OTHER; note = 2'-O-methyl-adenosine
  modified_base 5: mod_base = OTHER; note = 2'-fluoro-adenosine
  modified_base 6: mod_base = OTHER; note = 2'-O-methyl-adenosine
  modified_base 7: mod_base = OTHER; note = 2'-fluoro-adenosine
  modified_base 8: mod_base = OTHER; note = 2'-O-methyl-guanosine
  modified_base 9: mod_base = OTHER; note = 2'-O-methyl-guanosine
  modified_base 10: mod_base = OTHER; note = 2'-fluoro-guanosine
  modified_base 11: mod_base = OTHER; note = 2'-O-methyl-uridine
  modified_base 12: mod_base = OTHER; note = 2'-O-methyl-uridine
  modified_base 13: mod_base = OTHER; note = 2'-O-methyl-cytidine
  modified_base 14: mod_base = OTHER; note = 2'-fluoro-cytidine
  modified_base 15: mod_base = OTHER; note = 2'-O-methyl-adenosine
  modified_base 16: mod_base = OTHER; note = 2'-fluoro-cytidine
  modified_base 17: mod_base = OTHER; note = 2'-O-methyl-cytidine
  modified_base 18: mod_base = OTHER; note = 2'-O-methyl-adenosine
  modified_base 19: mod_base = OTHER; note = 2'-O-methyl-cytidine
  modified_base 20: mod_base = OTHER; note = 2'-O-methyl-guanosine with phosphorothioate linkage
  modified_base 21: mod_base = OTHER; note = 2'-O-methyl-adenosine with phosphorothioate linkage
  modified_base 22: mod_base = OTHER; note = 2'-O-methyl-uridine
tataaaagggttccaccacgat

SEQ ID NO: 381 - RNA, 22 nt, synthetic construct
  source 1..22: mol_type = other RNA
  modified_base 1: mod_base = OTHER; note = 2'-O-methyl-uridine with phosphorothioate linkage
  modified_base 2: mod_base = OTHER; note = 2'-fluoro-adenosine with phosphorothioate linkage
  modified_base 3: mod_base = OTHER; note = 2'-fluoro-adenosine
  modified_base 4: mod_base = OTHER; note = 2'-O-methyl-uridine
  modified_base 5: mod_base = OTHER; note = 2'-fluoro-adenosine
  modified_base 6: mod_base = OTHER; note = 2'-O-methyl-adenosine
  modified_base 7: mod_base = OTHER; note = 2'-fluoro-adenosine
  modified_base 8: mod_base = OTHER; note = 2'-O-methyl-adenosine
  modified_base 9: mod_base = OTHER; note = 2'-O-methyl-guanosine
  modified_base 10: mod_base = OTHER; note = 2'-fluoro-guanosine
  modified_base 11: mod_base = OTHER; note = 2'-O-methyl-guanosine
  modified_base 12: mod_base = OTHER; note = 2'-O-methyl-uridine
  modified_base 13: mod_base = OTHER; note = 2'-O-methyl-uridine
  modified_base 14: mod_base = OTHER; note = 2'-fluoro-cytidine
  modified_base 15: mod_base = OTHER; note = 2'-O-methyl-cytidine
  modified_base 16: mod_base = OTHER; note = 2'-fluoro-adenosine
  modified_base 17: mod_base = OTHER; note = 2'-O-methyl-cytidine
  modified_base 18: mod_base = OTHER; note = 2'-O-methyl-cytidine
  modified_base 19: mod_base = OTHER; note = 2'-O-methyl-adenosine
  modified_base 20: mod_base = OTHER; note = 2'-O-methyl-cytidine with phosphorothioate linkage
  modified_base 21: mod_base = OTHER; note = 2'-O-methyl-guanosine with phosphorothioate linkage
  modified_base 22: mod_base = OTHER; note = 2'-O-methyl-adenosine
taataaaagggttccaccacga

SEQ ID NO: 382 - RNA, 22 nt, synthetic construct
  source 1..22: mol_type = other RNA
  modified_base 1: mod_base = OTHER; note = 2'-O-methyl-uridine with phosphorothioate linkage
  modified_base 2: mod_base = OTHER; note = 2'-fluoro-uridine with phosphorothioate linkage
  modified_base 3: mod_base = OTHER; note = 2'-fluoro-uridine
  modified_base 4: mod_base = OTHER; note = 2'-O-methyl-adenosine
  modified_base 5: mod_base = OTHER; note = 2'-fluoro-adenosine
  modified_base 6: mod_base = OTHER; note = 2'-O-methyl-uridine
  modified_base 7: mod_base = OTHER; note = 2'-fluoro-adenosine
  modified_base 8: mod_base = OTHER; note = 2'-O-methyl-adenosine
  modified_base 9: mod_base = OTHER; note = 2'-O-methyl-adenosine
  modified_base 10: mod_base = OTHER; note = 2'-fluoro-adenosine
  modified_base 11: mod_base = OTHER; note = 2'-O-methyl-guanosine
  modified_base 12: mod_base = OTHER; note = 2'-O-methyl-guanosine
  modified_base 13: mod_base = OTHER; note = 2'-O-methyl-guanosine
  modified_base 14: mod_base = OTHER; note = 2'-fluoro-uridine
  modified_base 15: mod_base = OTHER; note = 2'-O-methyl-uridine
  modified_base 16: mod_base = OTHER; note = 2'-fluoro-cytidine
  modified_base 17: mod_base = OTHER; note = 2'-O-methyl-cytidine
  modified_base 18: mod_base = OTHER; note = 2'-O-methyl-adenosine
  modified_base 19: mod_base = OTHER; note = 2'-O-methyl-cytidine
  modified_base 20: mod_base = OTHER; note = 2'-O-methyl-cytidine with phosphorothioate linkage
  modified_base 21: mod_base = OTHER; note = 2'-O-methyl-adenosine with phosphorothioate linkage
  modified_base 22: mod_base = OTHER; note = 2'-O-methyl-cytidine
tttaataaaagggttccaccac

SEQ ID NO: 383 - RNA, 22 nt, synthetic construct
  source 1..22: mol_type = other RNA
  modified_base 1: mod_base = OTHER; note = 2'-O-methyl-uridine with phosphorothioate linkage
  modified_base 2: mod_base = OTHER; note = 2'-fluoro-adenosine with phosphorothioate linkage
  modified_base 3: mod_base = OTHER; note = 2'-fluoro-cytidine
  modified_base 4: mod_base = OTHER; note = 2'-O-methyl-adenosine
  modified_base 5: mod_base = OTHER; note = 2'-fluoro-guanosine
  modified_base 6: mod_base = OTHER; note = 2'-O-methyl-uridine
  modified_base 7: mod_base = OTHER; note = 2'-fluoro-uridine
  modified_base 8: mod_base = OTHER; note = 2'-O-methyl-adenosine
  modified_base 9: mod_base = OTHER; note = 2'-O-methyl-adenosine
  modified_base 10: mod_base = OTHER; note = 2'-fluoro-adenosine
  modified_base 11: mod_base = OTHER; note = 2'-O-methyl-uridine
  modified_base 12: mod_base = OTHER; note = 2'-O-methyl-adenosine
  modified_base 13: mod_base = OTHER; note = 2'-O-methyl-uridine
  modified_base 14: mod_base = OTHER; note = 2'-fluoro-guanosine
  modified_base 15: mod_base = OTHER; note = 2'-O-methyl-guanosine
  modified_base 16: mod_base = OTHER; note = 2'-fluoro-guanosine
  modified_base 17: mod_base = OTHER; note = 2'-O-methyl-adenosine
  modified_base 18: mod_base = OTHER; note = 2'-O-methyl-uridine
  modified_base 19: mod_base = OTHER; note = 2'-O-methyl-adenosine
  modified_base 20: mod_base = OTHER; note = 2'-O-methyl-guanosine with phosphorothioate linkage
  modified_base 21: mod_base = OTHER; note = 2'-O-methyl-uridine with phosphorothioate linkage
  modified_base 22: mod_base = OTHER; note = 2'-O-methyl-adenosine
tacagttaaatatgggatagta

SEQ ID NO: 384 - RNA, 22 nt, synthetic construct
  source 1..22: mol_type = other RNA
  modified_base 1: mod_base = OTHER; note = 2'-O-methyl-uridine with phosphorothioate linkage
  modified_base 2: mod_base = OTHER; note = 2'-fluoro-uridine with phosphorothioate linkage
  modified_base 3: mod_base = OTHER; note = 2'-fluoro-adenosine
  modified_base 4: mod_base = OTHER; note = 2'-O-methyl-guanosine
  modified_base 5: mod_base = OTHER; note = 2'-fluoro-adenosine
  modified_base 6: mod_base = OTHER; note = 2'-O-methyl-adenosine
  modified_base 7: mod_base = OTHER; note = 2'-fluoro-cytidine
  modified_base 8: mod_base = OTHER; note = 2'-O-methyl-adenosine
  modified_base 9: mod_base = OTHER; note = 2'-O-methyl-guanosine
  modified_base 10: mod_base = OTHER; note = 2'-fluoro-uridine
  modified_base 11: mod_base = OTHER; note = 2'-O-methyl-uridine
  modified_base 12: mod_base = OTHER; note = 2'-O-methyl-adenosine
  modified_base 13: mod_base = OTHER; note = 2'-O-methyl-adenosine
  modified_base 14: mod_base = OTHER; note = 2'-fluoro-adenosine
  modified_base 15: mod_base = OTHER; note = 2'-O-methyl-uridine
  modified_base 16: mod_base = OTHER; note = 2'-fluoro-adenosine
  modified_base 17: mod_base = OTHER; note = 2'-O-methyl-uridine
  modified_base 18: mod_base = OTHER; note = 2'-O-methyl-guanosine
  modified_base 19: mod_base = OTHER; note = 2'-O-methyl-guanosine
  modified_base 20: mod_base = OTHER; note = 2'-O-methyl-guanosine with phosphorothioate linkage
  modified_base 21: mod_base = OTHER; note = 2'-O-methyl-adenosine with phosphorothioate linkage
  modified_base 22: mod_base = OTHER; note = 2'-O-methyl-uridine
ttagaacagttaaatatgggat

SEQ ID NO: 385 - RNA, 22 nt, synthetic construct
  source 1..22: mol_type = other RNA
  modified_base 1: mod_base = OTHER; note = 2'-O-methyl-uridine with phosphorothioate linkage
  modified_base 2: mod_base = OTHER; note = 2'-fluoro-uridine with phosphorothioate linkage
  modified_base 3: mod_base = OTHER; note = 2'-fluoro-uridine
  modified_base 4: mod_base = OTHER; note = 2'-O-methyl-adenosine
  modified_base 5: mod_base = OTHER; note = 2'-fluoro-adenosine
  modified_base 6: mod_base = OTHER; note = 2'-O-methyl-uridine
  modified_base 7: mod_base = OTHER; note = 2'-fluoro-adenosine
  modified_base 8: mod_base = OTHER; note = 2'-O-methyl-adenosine
  modified_base 9: mod_base = OTHER; note = 2'-O-methyl-guanosine
  modified_base 10: mod_base = OTHER; note = 2'-fluoro-uridine
  modified_base 11: mod_base = OTHER; note = 2'-O-methyl-guanosine
  modified_base 12: mod_base = OTHER; note = 2'-O-methyl-guanosine
  modified_base 13: mod_base = OTHER; note = 2'-O-methyl-adenosine
  modified_base 14: mod_base = OTHER; note = 2'-fluoro-uridine
  modified_base 15: mod_base = OTHER; note = 2'-O-methyl-guanosine
  modified_base 16: mod_base = OTHER; note = 2'-fluoro-adenosine
  modified_base 17: mod_base = OTHER; note = 2'-O-methyl-guanosine
  modified_base 18: mod_base = OTHER; note = 2'-O-methyl-adenosine
  modified_base 19: mod_base = OTHER; note = 2'-O-methyl-guanosine
  modified_base 20: mod_base = OTHER; note = 2'-O-methyl-cytidine with phosphorothioate linkage
  modified_base 21: mod_base = OTHER; note = 2'-O-methyl-adenosine with phosphorothioate linkage
  modified_base 22: mod_base = OTHER; note = 2'-O-methyl-uridine
tttaataagtggatgagagcat

SEQ ID NO: 386 - RNA, 22 nt, synthetic construct
  source 1..22: mol_type = other RNA
  modified_base 1: mod_base = OTHER; note = 2'-O-methyl-uridine with phosphorothioate linkage
  modified_base 2: mod_base = OTHER; note = 2'-fluoro-uridine with phosphorothioate linkage
  modified_base 3: mod_base = OTHER; note = 2'-fluoro-cytidine
  modified_base 4: mod_base = OTHER; note = 2'-O-methyl-uridine
  modified_base 5: mod_base = OTHER; note = 2'-fluoro-uridine
  modified_base 6: mod_base = OTHER; note = 2'-O-methyl-guanosine
  modified_base 7: mod_base = OTHER; note = 2'-fluoro-uridine
  modified_base 8: mod_base = OTHER; note = 2'-O-methyl-adenosine
  modified_base 9: mod_base = OTHER; note = 2'-O-methyl-cytidine
  modified_base 10: mod_base = OTHER; note = 2'-fluoro-cytidine
  modified_base 11: mod_base = OTHER; note = 2'-O-methyl-cytidine
  modified_base 12: mod_base = OTHER; note = 2'-O-methyl-guanosine
  modified_base 13: mod_base = OTHER; note = 2'-O-methyl-adenosine
  modified_base 14: mod_base = OTHER; note = 2'-fluoro-uridine
  modified_base 15: mod_base = OTHER; note = 2'-O-methyl-adenosine
  modified_base 16: mod_base = OTHER; note = 2'-fluoro-uridine
  modified_base 17: mod_base = OTHER; note = 2'-O-methyl-uridine
  modified_base 18: mod_base = OTHER; note = 2'-O-methyl-guanosine
  modified_base 19: mod_base = OTHER; note = 2'-O-methyl-uridine
  modified_base 20: mod_base = OTHER; note = 2'-O-methyl-guanosine with phosphorothioate linkage
  modified_base 21: mod_base = OTHER; note = 2'-O-methyl-guanosine with phosphorothioate linkage
  modified_base 22: mod_base = OTHER; note = 2'-O-methyl-cytidine
ttcttgtacccgatattgtggc

SEQ ID NO: 387 - RNA, 22 nt, synthetic construct
  source 1..22: mol_type = other RNA
  modified_base 1: mod_base = OTHER; note = 2'-O-methyl-uridine with phosphorothioate linkage
  modified_base 2: mod_base = OTHER; note = 2'-fluoro-uridine with phosphorothioate linkage
  modified_base 3: mod_base = OTHER; note = 2'-fluoro-adenosine
  modified_base 4: mod_base = OTHER; note = 2'-O-methyl-uridine
  modified_base 5: mod_base = OTHER; note = 2'-fluoro-cytidine
  modified_base 6: mod_base = OTHER; note = 2'-O-methyl-uridine
  modified_base 7: mod_base = OTHER; note = 2'-fluoro-adenosine
  modified_base 8: mod_base = OTHER; note = 2'-O-methyl-uridine
  modified_base 9: mod_base = OTHER; note = 2'-O-methyl-cytidine
  modified_base 10: mod_base = OTHER; note = 2'-fluoro-uridine
  modified_base 11: mod_base = OTHER; note = 2'-O-methyl-uridine
  modified_base 12: mod_base = OTHER; note = 2'-O-methyl-uridine
  modified_base 13: mod_base = OTHER; note = 2'-O-methyl-guanosine
  modified_base 14: mod_base = OTHER; note = 2'-fluoro-uridine
  modified_base 15: mod_base = OTHER; note = 2'-O-methyl-adenosine
  modified_base 16: mod_base = OTHER; note = 2'-fluoro-uridine
  modified_base 17: mod_base = OTHER; note = 2'-O-methyl-uridine
  modified_base 18: mod_base = OTHER; note = 2'-O-methyl-cytidine
  modified_base 19: mod_base = OTHER; note = 2'-O-methyl-cytidine
  modified_base 20: mod_base = OTHER; note = 2'-O-methyl-cytidine with phosphorothioate linkage
  modified_base 21: mod_base = OTHER; note = 2'-O-methyl-uridine with phosphorothioate linkage
  modified_base 22: mod_base = OTHER; note = 2'-O-methyl-cytidine
ttatctatctttgtattccctc

SEQ ID NO: 388 - RNA, 22 nt, synthetic construct
  source 1..22: mol_type = other RNA
  modified_base 1: mod_base = OTHER; note = 2'-O-methyl-uridine with phosphorothioate linkage
  modified_base 2: mod_base = OTHER; note = 2'-fluoro-uridine with phosphorothioate linkage
  modified_base 3: mod_base = OTHER; note = 2'-fluoro-uridine
  modified_base 4: mod_base = OTHER; note = 2'-O-methyl-adenosine
  modified_base 5: mod_base = OTHER; note = 2'-fluoro-adenosine
  modified_base 6: mod_base = OTHER; note = 2'-O-methyl-adenosine
  modified_base 7: mod_base = OTHER; note = 2'-fluoro-adenosine
  modified_base 8: mod_base = OTHER; note = 2'-O-methyl-uridine
  modified_base 9: mod_base = OTHER; note = 2'-O-methyl-cytidine
  modified_base 10: mod_base = OTHER; note = 2'-fluoro-cytidine
  modified_base 11: mod_base = OTHER; note = 2'-O-methyl-cytidine
  modified_base 12: mod_base = OTHER; note = 2'-O-methyl-uridine
  modified_base 13: mod_base = OTHER; note = 2'-O-methyl-guanosine
  modified_base 14: mod_base = OTHER; note = 2'-fluoro-adenosine
  modified_base 15: mod_base = OTHER; note = 2'-O-methyl-guanosine
  modified_base 16: mod_base = OTHER; note = 2'-fluoro-guanosine
  modified_base 17: mod_base = OTHER; note = 2'-O-methyl-guanosine
  modified_base 18: mod_base = OTHER; note = 2'-O-methyl-cytidine
  modified_base 19: mod_base = OTHER; note = 2'-O-methyl-adenosine
  modified_base 20: mod_base = OTHER; note = 2'-O-methyl-guanosine with phosphorothioate linkage
  modified_base 21: mod_base = OTHER; note = 2'-O-methyl-guanosine with phosphorothioate linkage
  modified_base 22: mod_base = OTHER; note = 2'-O-methyl-adenosine
tttaaaatccctgagggcagga

SEQ ID NO: 389 - RNA, 22 nt, synthetic construct
  source 1..22: mol_type = other RNA
  modified_base 1: mod_base = OTHER; note = 2'-O-methyl-uridine with phosphorothioate linkage
  modified_base 2: mod_base = OTHER; note = 2'-fluoro-adenosine with phosphorothioate linkage
  modified_base 3: mod_base = OTHER; note = 2'-fluoro-uridine
  modified_base 4: mod_base = OTHER; note = 2'-O-methyl-uridine
  modified_base 5: mod_base = OTHER; note = 2'-fluoro-uridine
  modified_base 6: mod_base = OTHER; note = 2'-O-methyl-uridine
  modified_base 7: mod_base = OTHER; note = 2'-fluoro-cytidine
  modified_base 8: mod_base = OTHER; note = 2'-O-methyl-adenosine
  modified_base 9: mod_base = OTHER; note = 2'-O-methyl-guanosine
  modified_base 10: mod_base = OTHER; note = 2'-fluoro-adenosine
  modified_base 11: mod_base = OTHER; note = 2'-O-methyl-cytidine
  modified_base 12: mod_base = OTHER; note = 2'-O-methyl-cytidine
  modified_base 13: mod_base = OTHER; note = 2'-O-methyl-uridine
  modified_base 14: mod_base = OTHER; note = 2'-fluoro-adenosine
  modified_base 15: mod_base = OTHER; note = 2'-O-methyl-uridine
  modified_base 16: mod_base = OTHER; note = 2'-fluoro-cytidine
  modified_base 17: mod_base = OTHER; note = 2'-O-methyl-cytidine
  modified_base 18: mod_base = OTHER; note = 2'-O-methyl-uridine
  modified_base 19: mod_base = OTHER; note = 2'-O-methyl-adenosine
  modified_base 20: mod_base = OTHER; note = 2'-O-methyl-guanosine with phosphorothioate linkage
  modified_base 21: mod_base = OTHER; note = 2'-O-methyl-adenosine with phosphorothioate linkage
  modified_base 22: mod_base = OTHER; note = 2'-O-methyl-adenosine
tattttcagacctatcctagaa

SEQ ID NO: 390 - RNA, 22 nt, synthetic construct
  source 1..22: mol_type = other RNA
  modified_base 1: mod_base = OTHER; note = 2'-O-methyl-uridine with phosphorothioate linkage
  modified_base 2: mod_base = OTHER; note = 2'-fluoro-uridine with phosphorothioate linkage
  modified_base 3: mod_base = OTHER; note = 2'-fluoro-cytidine
  modified_base 4: mod_base = OTHER; note = 2'-O-methyl-cytidine
  modified_base 5: mod_base = OTHER; note = 2'-fluoro-adenosine
  modified_base 6: mod_base = OTHER; note = 2'-O-methyl-adenosine
  modified_base 7: mod_base = OTHER; note = 2'-fluoro-adenosine
  modified_base 8: mod_base = OTHER; note = 2'-O-methyl-uridine
  modified_base 9: mod_base = OTHER; note = 2'-O-methyl-adenosine
  modified_base 10: mod_base = OTHER; note = 2'-fluoro-adenosine
  modified_base 11: mod_base = OTHER; note = 2'-O-methyl-adenosine
  modified_base 12: mod_base = OTHER; note = 2'-O-methyl-guanosine
  modified_base 13: mod_base = OTHER; note = 2'-O-methyl-cytidine
  modified_base 14: mod_base = OTHER; note = 2'-fluoro-uridine
  modified_base 15: mod_base = OTHER; note = 2'-O-methyl-adenosine
  modified_base 16: mod_base = OTHER; note = 2'-fluoro-cytidine
  modified_base 17: mod_base = OTHER; note = 2'-O-methyl-uridine
  modified_base 18: mod_base = OTHER; note = 2'-O-methyl-uridine
  modified_base 19: mod_base = OTHER; note = 2'-O-methyl-uridine
  modified_base 20: mod_base = OTHER; note = 2'-O-methyl-cytidine with phosphorothioate linkage
  modified_base 21: mod_base = OTHER; note = 2'-O-methyl-uridine with phosphorothioate linkage
  modified_base 22: mod_base = OTHER; note = 2'-O-methyl-adenosine
ttccaaataaagctactttcta

SEQ ID NO: 391 - RNA, 22 nt, synthetic construct
  source 1..22: mol_type = other RNA
  modified_base 1: mod_base = OTHER; note = 2'-O-methyl-uridine with phosphorothioate linkage
  modified_base 2: mod_base = OTHER; note = 2'-fluoro-uridine with phosphorothioate linkage
  modified_base 3: mod_base = OTHER; note = 2'-fluoro-adenosine
  modified_base 4: mod_base = OTHER; note = 2'-O-methyl-guanosine
  modified_base 5: mod_base = OTHER; note = 2'-fluoro-adenosine
  modified_base 6: mod_base = OTHER; note = 2'-O-methyl-uridine
  modified_base 7: mod_base = OTHER; note = 2'-fluoro-uridine
  modified_base 8: mod_base = OTHER; note = 2'-O-methyl-guanosine
  modified_base 9: mod_base = OTHER; note = 2'-O-methyl-uridine
  modified_base 10: mod_base = OTHER; note = 2'-fluoro-cytidine
  modified_base 11: mod_base = OTHER; note = 2'-O-methyl-uridine
  modified_base 12: mod_base = OTHER; note = 2'-O-methyl-guanosine
  modified_base 13: mod_base = OTHER; note = 2'-O-methyl-uridine
  modified_base 14: mod_base = OTHER; note = 2'-fluoro-adenosine
  modified_base 15: mod_base = OTHER; note = 2'-O-methyl-adenosine
  modified_base 16: mod_base = OTHER; note = 2'-fluoro-uridine
  modified_base 17: mod_base = OTHER; note = 2'-O-methyl-adenosine
  modified_base 18: mod_base = OTHER; note = 2'-O-methyl-uridine
  modified_base 19: mod_base = OTHER; note = 2'-O-methyl-cytidine
  modified_base 20: mod_base = OTHER; note = 2'-O-methyl-cytidine with phosphorothioate linkage
  modified_base 21: mod_base = OTHER; note = 2'-O-methyl-adenosine with phosphorothioate linkage
  modified_base 22: mod_base = OTHER; note = 2'-O-methyl-adenosine
ttagattgtctgtaatatccaa

SEQ ID NO: 392 - RNA, 22 nt, synthetic construct
  source 1..22: mol_type = other RNA
  modified_base 1: mod_base = OTHER; note = 2'-O-methyl-uridine with phosphorothioate linkage
  modified_base 2: mod_base = OTHER; note = 2'-fluoro-uridine with phosphorothioate linkage
  modified_base 3: mod_base = OTHER; note = 2'-fluoro-cytidine
  modified_base 4: mod_base = OTHER; note = 2'-O-methyl-uridine
  modified_base 5: mod_base = OTHER; note = 2'-fluoro-uridine
  modified_base 6: mod_base = OTHER; note = 2'-O-methyl-guanosine
  modified_base 7: mod_base = OTHER; note = 2'-fluoro-uridine
  modified_base 8: mod_base = OTHER; note = 2'-O-methyl-uridine
  modified_base 9: mod_base = OTHER; note = 2'-O-methyl-uridine
  modified_base 10: mod_base = OTHER; note = 2'-fluoro-adenosine
  modified_base 11: mod_base = OTHER; note = 2'-O-methyl-uridine
  modified_base 12: mod_base = OTHER; note = 2'-O-methyl-uridine
  modified_base 13: mod_base = OTHER; note = 2'-O-methyl-uridine
  modified_base 14: mod_base = OTHER; note = 2'-fluoro-guanosine
  modified_base 15: mod_base = OTHER; note = 2'-O-methyl-adenosine
  modified_base 16: mod_base = OTHER; note = 2'-fluoro-guanosine
  modified_base 17: mod_base = OTHER; note = 2'-O-methyl-guanosine
  modified_base 18: mod_base = OTHER; note = 2'-O-methyl-cytidine
  modified_base 19: mod_base = OTHER; note = 2'-O-methyl-adenosine
  modified_base 20: mod_base = OTHER; note = 2'-O-methyl-cytidine with phosphorothioate linkage
  modified_base 21: mod_base = OTHER; note = 2'-O-methyl-guanosine with phosphorothioate linkage
  modified_base 22: mod_base = OTHER; note = 2'-O-methyl-uridine
ttcttgtttatttgaggcacgt

SEQ ID NO: 393 - RNA, 22 nt, synthetic construct
  source 1..22: mol_type = other RNA
  modified_base 1: mod_base = OTHER; note = 2'-O-methyl-uridine with phosphorothioate linkage
  modified_base 2: mod_base = OTHER; note = 2'-fluoro-adenosine with phosphorothioate linkage
  modified_base 3: mod_base = OTHER; note = 2'-fluoro-uridine
  modified_base 4: mod_base = OTHER; note = 2'-O-methyl-uridine
  modified_base 5: mod_base = OTHER; note = 2'-fluoro-cytidine
  modified_base 6: mod_base = OTHER; note = 2'-O-methyl-uridine
  modified_base 7: mod_base = OTHER; note = 2'-fluoro-uridine
  modified_base 8: mod_base = OTHER; note = 2'-O-methyl-guanosine
  modified_base 9: mod_base = OTHER; note = 2'-O-methyl-uridine
  modified_base 10: mod_base = OTHER; note = 2'-fluoro-uridine
  modified_base 11: mod_base = OTHER; note = 2'-O-methyl-uridine
  modified_base 12: mod_base = OTHER; note = 2'-O-methyl-adenosine
  modified_base 13: mod_base = OTHER; note = 2'-O-methyl-uridine
  modified_base 14: mod_base = OTHER; note = 2'-fluoro-uridine
  modified_base 15: mod_base = OTHER; note = 2'-O-methyl-uridine
  modified_base 16: mod_base = OTHER; note = 2'-fluoro-guanosine
  modified_base 17: mod_base = OTHER; note = 2'-O-methyl-adenosine
  modified_base 18: mod_base = OTHER; note = 2'-O-methyl-guanosine
  modified_base 19: mod_base = OTHER; note = 2'-O-methyl-guanosine
  modified_base 20: mod_base = OTHER; note = 2'-O-methyl-cytidine with phosphorothioate linkage
  modified_base 21: mod_base = OTHER; note = 2'-O-methyl-adenosine with phosphorothioate linkage
  modified_base 22: mod_base = OTHER; note = 2'-O-methyl-cytidine
tattcttgtttatttgaggcac

SEQ ID NO: 394 - RNA, 22 nt, synthetic construct
  source 1..22: mol_type = other RNA
  modified_base 1: mod_base = OTHER; note = 2'-O-methyl-uridine with phosphorothioate linkage
  modified_base 2: mod_base = OTHER; note = 2'-fluoro-uridine with phosphorothioate linkage
  modified_base 3: mod_base = OTHER; note = 2'-fluoro-uridine
  modified_base 4: mod_base = OTHER; note = 2'-O-methyl-adenosine
  modified_base 5: mod_base = OTHER; note = 2'-fluoro-guanosine
  modified_base 6: mod_base = OTHER; note = 2'-O-methyl-adenosine
  modified_base 7: mod_base = OTHER; note = 2'-fluoro-cytidine
  modified_base 8: mod_base = OTHER; note = 2'-O-methyl-adenosine
  modified_base 9: mod_base = OTHER; note = 2'-O-methyl-cytidine
  modified_base 10: mod_base = OTHER; note = 2'-fluoro-cytidine
  modified_base 11: mod_base = OTHER; note = 2'-O-methyl-cytidine
  modified_base 12: mod_base = OTHER; note = 2'-O-methyl-uridine
  modified_base 13: mod_base = OTHER; note = 2'-O-methyl-cytidine
  modified_base 14: mod_base = OTHER; note = 2'-fluoro-adenosine
  modified_base 15: mod_base = OTHER; note = 2'-O-methyl-adenosine
  modified_base 16: mod_base = OTHER; note = 2'-fluoro-adenosine
  modified_base 17: mod_base = OTHER; note = 2'-O-methyl-uridine
  modified_base 18: mod_base = OTHER; note = 2'-O-methyl-adenosine
  modified_base 19: mod_base = OTHER; note = 2'-O-methyl-adenosine
  modified_base 20: mod_base = OTHER; note = 2'-O-methyl-guanosine with phosphorothioate linkage
  modified_base 21: mod_base = OTHER; note = 2'-O-methyl-cytidine with phosphorothioate linkage
  modified_base 22: mod_base = OTHER; note = 2'-O-methyl-uridine
tttagacaccctcaaataagct

SEQ ID NO: 395 - RNA, 22 nt, synthetic construct
  source 1..22: mol_type = other RNA
  modified_base 1: mod_base = OTHER; note = 2'-O-methyl-uridine with phosphorothioate linkage
  modified_base 2: mod_base = OTHER; note = 2'-fluoro-adenosine with phosphorothioate linkage
  modified_base 3: mod_base = OTHER; note = 2'-fluoro-adenosine
  modified_base 4: mod_base = OTHER; note = 2'-O-methyl-cytidine
  modified_base 5: mod_base = OTHER; note = 2'-fluoro-adenosine
  modified_base 6: mod_base = OTHER; note = 2'-O-methyl-uridine
  modified_base 7: mod_base = OTHER; note = 2'-fluoro-adenosine
  modified_base 8: mod_base = OTHER; note = 2'-O-methyl-cytidine
  modified_base 9: mod_base = OTHER; note = 2'-O-methyl-guanosine
  modified_base 10: mod_base = OTHER; note = 2'-fluoro-guanosine
  modified_base 11: mod_base = OTHER; note = 2'-O-methyl-adenosine
  modified_base 12: mod_base = OTHER; note = 2'-O-methyl-uridine
  modified_base 13: mod_base = OTHER; note = 2'-O-methyl-uridine
  modified_base 14: mod_base = OTHER; note = 2'-fluoro-uridine
  modified_base 15: mod_base = OTHER; note = 2'-O-methyl-cytidine
  modified_base 16: mod_base = OTHER; note = 2'-fluoro-uridine
  modified_base 17: mod_base = OTHER; note = 2'-O-methyl-uridine
  modified_base 18: mod_base = OTHER; note = 2'-O-methyl-cytidine
  modified_base 19: mod_base = OTHER; note = 2'-O-methyl-adenosine
  modified_base 20: mod_base = OTHER; note = 2'-O-methyl-guanosine with phosphorothioate linkage
  modified_base 21: mod_base = OTHER; note = 2'-O-methyl-adenosine with phosphorothioate linkage
  modified_base 22: mod_base = OTHER; note = 2'-O-methyl-guanosine
taacatacggatttcttcagag

SEQ ID NO: 396 - RNA, 22 nt, synthetic construct
  source 1..22: mol_type = other RNA
  modified_base 1: mod_base = OTHER; note = 2'-O-methyl-uridine with phosphorothioate linkage
  modified_base 2: mod_base = OTHER; note = 2'-fluoro-adenosine with phosphorothioate linkage
  modified_base 3: mod_base = OTHER; note = 2'-fluoro-adenosine
  modified_base 4: mod_base = OTHER; note = 2'-O-methyl-adenosine
  modified_base 5: mod_base = OTHER; note = 2'-fluoro-adenosine
  modified_base 6: mod_base = OTHER; note = 2'-O-methyl-uridine
  modified_base 7: mod_base = OTHER; note = 2'-fluoro-guanosine
  modified_base 8: mod_base = OTHER; note = 2'-O-methyl-uridine
  modified_base 9: mod_base = OTHER; note = 2'-O-methyl-adenosine
  modified_base 10: mod_base = OTHER; note = 2'-fluoro-cytidine
  modified_base 11: mod_base = OTHER; note = 2'-O-methyl-uridine
  modified_base 12: mod_base = OTHER; note = 2'-O-methyl-adenosine
  modified_base 13: mod_base = OTHER; note = 2'-O-methyl-adenosine
  modified_base 14: mod_base = OTHER; note = 2'-fluoro-cytidine
  modified_base 15: mod_base = OTHER; note = 2'-O-methyl-adenosine
  modified_base 16: mod_base = OTHER; note = 2'-fluoro-uridine
  modified_base 17: mod_base = OTHER; note = 2'-O-methyl-adenosine
  modified_base 18: mod_base = OTHER; note = 2'-O-methyl-cytidine
  modified_base 19: mod_base = OTHER; note = 2'-O-methyl-guanosine
  modified_base 20: mod_base = OTHER; note = 2'-O-methyl-guanosine with phosphorothioate linkage
  modified_base 21: mod_base = OTHER; note = 2'-O-methyl-adenosine with phosphorothioate linkage
  modified_base 22: mod_base = OTHER; note = 2'-O-methyl-uridine
taaaatgtactaacatacggat

SEQ ID NO: 397 - RNA, 22 nt, synthetic construct
  source 1..22: mol_type = other RNA
  modified_base 1: mod_base = OTHER; note = 2'-O-methyl-uridine with phosphorothioate linkage
  modified_base 2: mod_base = OTHER; note = 2'-fluoro-adenosine with phosphorothioate linkage
  modified_base 3: mod_base = OTHER; note = 2'-fluoro-cytidine
  modified_base 4: mod_base = OTHER; note = 2'-O-methyl-adenosine
  modified_base 5: mod_base = OTHER; note = 2'-fluoro-adenosine
  modified_base 6: mod_base = OTHER; note = 2'-O-methyl-guanosine
  modified_base 7: mod_base = OTHER; note = 2'-fluoro-adenosine
  modified_base 8: mod_base = OTHER; note = 2'-O-methyl-adenosine
  modified_base 9: mod_base = OTHER; note = 2'-O-methyl-guanosine
  modified_base 10: mod_base = OTHER; note = 2'-fluoro-cytidine
  modified_base 11: mod_base = OTHER; note = 2'-O-methyl-cytidine
  modified_base 12: mod_base = OTHER; note = 2'-O-methyl-uridine
  modified_base 13: mod_base = OTHER; note = 2'-O-methyl-guanosine
  modified_base 14: mod_base = OTHER; note = 2'-fluoro-cytidine
  modified_base 15: mod_base = OTHER; note = 2'-O-methyl-cytidine
  modified_base 16: mod_base = OTHER; note = 2'-fluoro-uridine
  modified_base 17: mod_base = OTHER; note = 2'-O-methyl-uridine
  modified_base 18: mod_base = OTHER; note = 2'-O-methyl-adenosine
  modified_base 19: mod_base = OTHER; note = 2'-O-methyl-uridine
  modified_base 20: mod_base = OTHER; note = 2'-O-methyl-guanosine with phosphorothioate linkage
  modified_base 21: mod_base = OTHER; note = 2'-O-methyl-cytidine with phosphorothioate linkage
  modified_base 22: mod_base = OTHER; note = 2'-O-methyl-uridine
tacaagaagcctgccttatgct

SEQ ID NO: 398 - RNA, 22 nt, synthetic construct
  source 1..22: mol_type = other RNA
  modified_base 1: mod_base = OTHER; note = 2'-O-methyl-uridine with phosphorothioate linkage
  modified_base 2: mod_base = OTHER; note = 2'-fluoro-uridine with phosphorothioate linkage
  modified_base 3: mod_base = OTHER; note = 2'-fluoro-adenosine
  modified_base 4: mod_base = OTHER; note = 2'-O-methyl-adenosine
  modified_base 5: mod_base = OTHER; note = 2'-fluoro-cytidine
  modified_base 6: mod_base = OTHER; note = 2'-O-methyl-adenosine
  modified_base 7: mod_base = OTHER; note = 2'-fluoro-uridine
  modified_base 8: mod_base = OTHER; note = 2'-O-methyl-uridine
  modified_base 9: mod_base = OTHER; note = 2'-O-methyl-uridine
  modified_base 10: mod_base = OTHER; note = 2'-fluoro-guanosine
  modified_base 11: mod_base = OTHER; note = 2'-O-methyl-adenosine
  modified_base 12: mod_base = OTHER; note = 2'-O-methyl-cytidine
  modified_base 13: mod_base = OTHER; note = 2'-O-methyl-adenosine
  modified_base 14: mod_base = OTHER; note = 2'-fluoro-guanosine
  modified_base 15: mod_base = OTHER; note = 2'-O-methyl-cytidine
  modified_base 16: mod_base = OTHER; note = 2'-fluoro-adenosine
  modified_base 17: mod_base = OTHER; note = 2'-O-methyl-uridine
  modified_base 18: mod_base = OTHER; note = 2'-O-methyl-adenosine
  modified_base 19: mod_base = OTHER; note = 2'-O-methyl-adenosine
  modified_base 20: mod_base = OTHER; note = 2'-O-methyl-guanosine with phosphorothioate linkage
  modified_base 21: mod_base = OTHER; note = 2'-O-methyl-uridine with phosphorothioate linkage
  modified_base 22: mod_base = OTHER; note = 2'-O-methyl-adenosine
ttaacatttgacagcataagta

SEQ ID NO: 399 - RNA, 22 nt, synthetic construct
  source 1..22: mol_type = other RNA
  modified_base 1: mod_base = OTHER; note = 2'-O-methyl-uridine with phosphorothioate linkage
  modified_base 2: mod_base = OTHER; note = 2'-fluoro-adenosine with phosphorothioate linkage
  modified_base 3: mod_base = OTHER; note = 2'-fluoro-guanosine
  modified_base 4: mod_base = OTHER; note = 2'-O-methyl-uridine
  modified_base 5: mod_base = OTHER; note = 2'-fluoro-uridine
  modified_base 6: mod_base = OTHER; note = 2'-O-methyl-cytidine
  modified_base 7: mod_base = OTHER; note = 2'-fluoro-adenosine
  modified_base 8: mod_base = OTHER; note = 2'-O-methyl-uridine
  modified_base 9: mod_base = OTHER; note = 2'-O-methyl-guanosine
  modified_base 10: mod_base = OTHER; note = 2'-fluoro-cytidine
  modified_base 11: mod_base = OTHER; note = 2'-O-methyl-uridine
  modified_base 12: mod_base = OTHER; note = 2'-O-methyl-guanosine
  modified_base 13: mod_base = OTHER; note = 2'-O-methyl-adenosine
  modified_base 14: mod_base = OTHER; note = 2'-fluoro-adenosine
  modified_base 15: mod_base = OTHER; note = 2'-O-methyl-adenosine
  modified_base 16: mod_base = OTHER; note = 2'-fluoro-uridine
  modified_base 17: mod_base = OTHER; note = 2'-O-methyl-adenosine
  modified_base 18: mod_base = OTHER; note = 2'-O-methyl-cytidine
  modified_base 19: mod_base = OTHER; note = 2'-O-methyl-uridine
  modified_base 20: mod_base = OTHER; note = 2'-O-methyl-guanosine with phosphorothioate linkage
  modified_base 21: mod_base = OTHER; note = 2'-O-methyl-adenosine with phosphorothioate linkage
  modified_base 22: mod_base = OTHER; note = 2'-O-methyl-cytidine
tagttcatgctgaaatactgac

SEQ ID NO: 400 - RNA, 22 nt, synthetic construct
  source 1..22: mol_type = other RNA
  modified_base 1: mod_base = OTHER; note = 2'-O-methyl-uridine with phosphorothioate linkage
  modified_base 2: mod_base = OTHER; note = 2'-fluoro-adenosine with phosphorothioate linkage
  modified_base 3: mod_base = OTHER; note = 2'-fluoro-adenosine
  modified_base 4: mod_base = OTHER; note = 2'-O-methyl-guanosine
  modified_base 5: mod_base = OTHER; note = 2'-fluoro-cytidine
  modified_base 6: mod_base = OTHER; note = 2'-O-methyl-adenosine
  modified_base 7: mod_base = OTHER; note = 2'-fluoro-uridine
  modified_base 8: mod_base = OTHER; note = 2'-O-methyl-adenosine
  modified_base 9: mod_base = OTHER; note = 2'-O-methyl-cytidine
  modified_base 10: mod_base = OTHER; note = 2'-fluoro-adenosine
  modified_base 11: mod_base = OTHER; note = 2'-O-methyl-adenosine
  modified_base 12: mod_base = OTHER; note = 2'-O-methyl-cytidine
  modified_base 13: mod_base = OTHER; note = 2'-O-methyl-adenosine
  modified_base 14: mod_base = OTHER; note = 2'-fluoro-guanosine
  modified_base 15: mod_base = OTHER; note = 2'-O-methyl-adenosine
  modified_base 16: mod_base = OTHER; note = 2'-fluoro-adenosine
  modified_base 17: mod_base = OTHER; note = 2'-O-methyl-uridine
  modified_base 18: mod_base = OTHER; note = 2'-O-methyl-cytidine
  modified_base 19: mod_base = OTHER; note = 2'-O-methyl-uridine
  modified_base 20: mod_base = OTHER; note = 2'-O-methyl-guanosine with phosphorothioate linkage
  modified_base 21: mod_base = OTHER; note = 2'-O-methyl-uridine with phosphorothioate linkage
  modified_base 22: mod_base = OTHER; note = 2'-O-methyl-adenosine
taagcatacaacagaatctgta

SEQ ID NO: 401 - RNA, 22 nt, synthetic construct
  source 1..22: mol_type = other RNA
  modified_base 1: mod_base = OTHER; note = 2'-O-methyl-uridine with phosphorothioate linkage
  modified_base 2: mod_base = OTHER; note = 2'-fluoro-adenosine with phosphorothioate linkage
  modified_base 3: mod_base = OTHER; note = 2'-fluoro-guanosine
  modified_base 4: mod_base = OTHER; note = 2'-O-methyl-adenosine
  modified_base 5: mod_base = OTHER; note = 2'-fluoro-adenosine
  modified_base 6: mod_base = OTHER; note = 2'-O-methyl-guanosine
  modified_base 7: mod_base = OTHER; note = 2'-fluoro-adenosine
  modified_base 8: mod_base = OTHER; note = 2'-O-methyl-adenosine
  modified_base 9: mod_base = OTHER; note = 2'-O-methyl-adenosine
  modified_base 10: mod_base = OTHER; note = 2'-fluoro-guanosine
  modified_base 11: mod_base = OTHER; note = 2'-O-methyl-cytidine
  modified_base 12: mod_base = OTHER; note = 2'-O-methyl-adenosine
  modified_base 13: mod_base = OTHER; note = 2'-O-methyl-uridine
  modified_base 14: mod_base = OTHER; note = 2'-fluoro-adenosine
  modified_base 15: mod_base = OTHER; note = 2'-O-methyl-cytidine
  modified_base 16: mod_base = OTHER; note = 2'-fluoro-adenosine
  modified_base 17: mod_base = OTHER; note = 2'-O-methyl-adenosine
  modified_base 18: mod_base = OTHER; note = 2'-O-methyl-cytidine
  modified_base 19: mod_base = OTHER; note = 2'-O-methyl-adenosine
  modified_base 20: mod_base = OTHER; note = 2'-O-methyl-guanosine with phosphorothioate linkage
  modified_base 21: mod_base = OTHER; note = 2'-O-methyl-adenosine with phosphorothioate linkage
  modified_base 22: mod_base = OTHER; note = 2'-O-methyl-adenosine
tagaagaaagcatacaacagaa

SEQ ID NO: 402 - RNA, 22 nt, synthetic construct
  source 1..22: mol_type = other RNA
  modified_base 1: mod_base = OTHER; note = 2'-O-methyl-uridine with phosphorothioate linkage
  modified_base 2: mod_base = OTHER; note = 2'-fluoro-adenosine with phosphorothioate linkage
  modified_base 3: mod_base = OTHER; note = 2'-fluoro-uridine
  modified_base 4: mod_base = OTHER; note = 2'-O-methyl-adenosine
  modified_base 5: mod_base = OTHER; note = 2'-fluoro-guanosine
  modified_base 6: mod_base = OTHER; note = 2'-O-methyl-adenosine
  modified_base 7: mod_base = OTHER; note = 2'-fluoro-adenosine
  modified_base 8: mod_base = OTHER; note = 2'-O-methyl-guanosine
  modified_base 9: mod_base = OTHER; note = 2'-O-methyl-adenosine
  modified_base 10: mod_base = OTHER; note = 2'-fluoro-adenosine
  modified_base 11: mod_base = OTHER; note = 2'-O-methyl-adenosine
  modified_base 12: mod_base = OTHER; note = 2'-O-methyl-guanosine
  modified_base 13: mod_base = OTHER; note = 2'-O-methyl-cytidine
  modified_base 14: mod_base = OTHER; note = 2'-fluoro-adenosine
  modified_base 15: mod_base = OTHER; note = 2'-O-methyl-uridine
  modified_base 16: mod_base = OTHER; note = 2'-fluoro-adenosine
  modified_base 17: mod_base = OTHER; note = 2'-O-methyl-cytidine
  modified_base 18: mod_base = OTHER; note = 2'-O-methyl-adenosine
  modified_base 19: mod_base = OTHER; note = 2'-O-methyl-adenosine
  modified_base 20: mod_base = OTHER; note = 2'-O-methyl-cytidine with phosphorothioate linkage
  modified_base 21: mod_base = OTHER; note = 2'-O-methyl-adenosine with phosphorothioate linkage
  modified_base 22: mod_base = OTHER; note = 2'-O-methyl-guanosine
tatagaagaaagcatacaacag

SEQ ID NO: 403 - RNA, 22 nt, synthetic construct
  source 1..22: mol_type = other RNA
  modified_base 1: mod_base = OTHER; note = 2'-O-methyl-uridine with phosphorothioate linkage
  modified_base 2: mod_base = OTHER; note = 2'-fluoro-uridine with phosphorothioate linkage
  modified_base 3: mod_base = OTHER; note = 2'-fluoro-uridine
  modified_base 4: mod_base = OTHER; note = 2'-O-methyl-cytidine
  modified_base 5: mod_base = OTHER; note = 2'-fluoro-adenosine
  modified_base 6: mod_base = OTHER; note = 2'-O-methyl-cytidine
  modified_base 7: mod_base = OTHER; note = 2'-fluoro-uridine
  modified_base 8: mod_base = OTHER; note = 2'-O-methyl-uridine
  modified_base 9: mod_base = OTHER; note = 2'-O-methyl-adenosine
  modified_base 10: mod_base = OTHER; note = 2'-fluoro-adenosine
  modified_base 11: mod_base = OTHER; note = 2'-O-methyl-cytidine
  modified_base 12: mod_base = OTHER; note = 2'-O-methyl-uridine
  modified_base 13: mod_base = OTHER; note = 2'-O-methyl-cytidine
  modified_base 14: mod_base = OTHER; note = 2'-fluoro-uridine
  modified_base 15: mod_base = OTHER; note = 2'-O-methyl-cytidine
  modified_base 16: mod_base = OTHER; note = 2'-fluoro-adenosine
  modified_base 17: mod_base = OTHER; note = 2'-O-methyl-adenosine
  modified_base 18: mod_base = OTHER; note = 2'-O-methyl-guanosine
  modified_base 19: mod_base = OTHER; note = 2'-O-methyl-uridine
  modified_base 20: mod_base = OTHER; note = 2'-O-methyl-cytidine with phosphorothioate linkage
  modified_base 21: mod_base = OTHER; note = 2'-O-methyl-adenosine with phosphorothioate linkage
  modified_base 22: mod_base = OTHER; note = 2'-O-methyl-guanosine
tttcacttaactctcaagtcag

SEQ ID NO: 404 - RNA, 22 nt, synthetic construct
  source 1..22: mol_type = other RNA
  modified_base 1: mod_base = OTHER; note = 2'-O-methyl-uridine with phosphorothioate linkage
  modified_base 2: mod_base = OTHER; note = 2'-fluoro-adenosine with phosphorothioate linkage
  modified_base 3: mod_base = OTHER; note = 2'-fluoro-adenosine
  modified_base 4: mod_base = OTHER; note = 2'-O-methyl-adenosine
  modified_base 5: mod_base = OTHER; note = 2'-fluoro-adenosine
  modified_base 6: mod_base = OTHER; note = 2'-O-methyl-uridine
  modified_base 7: mod_base = OTHER; note = 2'-fluoro-adenosine
  modified_base 8: mod_base = OTHER; note = 2'-O-methyl-guanosine
  modified_base 9: mod_base = OTHER; note = 2'-O-methyl-uridine
  modified_base 10: mod_base = OTHER; note = 2'-fluoro-guanosine
  modified_base 11: mod_base = OTHER; note = 2'-O-methyl-cytidine
  modified_base 12: mod_base = OTHER; note = 2'-O-methyl-adenosine
  modified_base 13: mod_base = OTHER; note = 2'-O-methyl-cytidine
  modified_base 14: mod_base = OTHER; note = 2'-fluoro-guanosine
  modified_base 15: mod_base = OTHER; note = 2'-O-methyl-adenosine
  modified_base 16: mod_base = OTHER; note = 2'-fluoro-cytidine
  modified_base 17: mod_base = OTHER; note = 2'-O-methyl-adenosine
  modified_base 18: mod_base = OTHER; note = 2'-O-methyl-guanosine
  modified_base 19: mod_base = OTHER; note = 2'-O-methyl-uridine
  modified_base 20: mod_base = OTHER; note = 2'-O-methyl-cytidine with phosphorothioate linkage
  modified_base 21: mod_base = OTHER; note = 2'-O-methyl-adenosine with phosphorothioate linkage
  modified_base 22: mod_base = OTHER; note = 2'-O-methyl-uridine
taaaatagtgcacgacagtcat

SEQ ID NO: 405 - RNA, 22 nt, synthetic construct
  source 1..22: mol_type = other RNA
  modified_base 1: mod_base = OTHER; note = 2'-O-methyl-uridine with phosphorothioate linkage
  modified_base 2: mod_base = OTHER; note = 2'-fluoro-uridine with phosphorothioate linkage
  modified_base 3: mod_base = OTHER; note = 2'-fluoro-guanosine
  modified_base 4: mod_base = OTHER; note = 2'-O-methyl-adenosine
  modified_base 5: mod_base = OTHER; note = 2'-fluoro-adenosine
  modified_base 6: mod_base = OTHER; note = 2'-O-methyl-adenosine
  modified_base 7: mod_base = OTHER; note = 2'-fluoro-adenosine
  modified_base 8: mod_base = OTHER; note = 2'-O-methyl-guanosine
  modified_base 9: mod_base = OTHER; note = 2'-O-methyl-cytidine
  modified_base 10: mod_base = OTHER; note = 2'-fluoro-adenosine
  modified_base 11: mod_base = OTHER; note = 2'-O-methyl-adenosine
  modified_base 12: mod_base = OTHER; note = 2'-O-methyl-guanosine
  modified_base 13: mod_base = OTHER; note = 2'-O-methyl-uridine
  modified_base 14: mod_base = OTHER; note = 2'-fluoro-guanosine
  modified_base 15: mod_base = OTHER; note = 2'-O-methyl-cytidine
  modified_base 16: mod_base = OTHER; note = 2'-fluoro-uridine
  modified_base 17: mod_base = OTHER; note = 2'-O-methyl-adenosine
  modified_base 18: mod_base = OTHER; note = 2'-O-methyl-uridine
  modified_base 19: mod_base = OTHER; note = 2'-O-methyl-guanosine
  modified_base 20: mod_base = OTHER; note = 2'-O-methyl-cytidine with phosphorothioate linkage
  modified_base 21: mod_base = OTHER; note = 2'-O-methyl-cytidine with phosphorothioate linkage
  modified_base 22: mod_base = OTHER; note = 2'-O-methyl-uridine
ttgaaaagcaagtgctatgcct

SEQ ID NO: 406 - RNA, 22 nt, synthetic construct
  source 1..22: mol_type = other RNA
  modified_base 1: mod_base = OTHER; note = 2'-O-methyl-uridine with phosphorothioate linkage
  modified_base 2: mod_base = OTHER; note = 2'-fluoro-adenosine with phosphorothioate linkage
  modified_base 3: mod_base = OTHER; note = 2'-fluoro-cytidine
  modified_base 4: mod_base = OTHER; note = 2'-O-methyl-uridine
  modified_base 5: mod_base = OTHER; note = 2'-fluoro-uridine
  modified_base 6: mod_base = OTHER; note = 2'-O-methyl-cytidine
  modified_base 7: mod_base = OTHER; note = 2'-fluoro-uridine
  modified_base 8: mod_base = OTHER; note = 2'-O-methyl-adenosine
  modified_base 9: mod_base = OTHER; note = 2'-O-methyl-adenosine
  modified_base 10: mod_base = OTHER; note = 2'-fluoro-cytidine
  modified_base 11: mod_base = OTHER; note = 2'-O-methyl-cytidine
  modified_base 12: mod_base = OTHER; note = 2'-O-methyl-uridine
  modified_base 13: mod_base = OTHER; note = 2'-O-methyl-adenosine
  modified_base 14: mod_base = OTHER; note = 2'-fluoro-adenosine
  modified_base 15: mod_base = OTHER; note = 2'-O-methyl-uridine
  modified_base 16: mod_base = OTHER; note = 2'-fluoro-guanosine
  modified_base 17: mod_base = OTHER; note = 2'-O-methyl-adenosine
  modified_base 18: mod_base = OTHER; note = 2'-O-methyl-adenosine
  modified_base 19: mod_base = OTHER; note = 2'-O-methyl-uridine
  modified_base 20: mod_base = OTHER; note = 2'-O-methyl-cytidine with phosphorothioate linkage
  modified_base 21: mod_base = OTHER; note = 2'-O-methyl-uridine with phosphorothioate linkage
  modified_base 22: mod_base = OTHER; note = 2'-O-methyl-adenosine
tacttctaacctaatgaatcta

SEQ ID NO: 407 - RNA, 22 nt, synthetic construct
  source 1..22: mol_type = other RNA
  modified_base 1: mod_base = OTHER; note = 2'-O-methyl-uridine with phosphorothioate linkage
  modified_base 2: mod_base = OTHER; note = 2'-fluoro-adenosine with phosphorothioate linkage
  modified_base 3: mod_base = OTHER; note = 2'-fluoro-guanosine
  modified_base 4: mod_base = OTHER; note = 2'-O-methyl-adenosine
  modified_base 5: mod_base = OTHER; note = 2'-fluoro-cytidine
  modified_base 6: mod_base = OTHER; note = 2'-O-methyl-uridine
  modified_base 7: mod_base = OTHER; note = 2'-fluoro-adenosine
  modified_base 8: mod_base = OTHER; note = 2'-O-methyl-uridine
  modified_base 9: mod_base = OTHER; note = 2'-O-methyl-guanosine
  modified_base 10: mod_base = OTHER; note = 2'-fluoro-cytidine
  modified_base 11: mod_base = OTHER; note = 2'-O-methyl-cytidine
  modified_base 12: mod_base = OTHER; note = 2'-O-methyl-cytidine
  modified_base 13: mod_base = OTHER; note = 2'-O-methyl-uridine
  modified_base 14: mod_base = OTHER; note = 2'-fluoro-adenosine
  modified_base 15: mod_base = OTHER; note = 2'-O-methyl-adenosine
  modified_base 16: mod_base = OTHER; note = 2'-fluoro-cytidine
  modified_base 17: mod_base = OTHER; note = 2'-O-methyl-adenosine
  modified_base 18: mod_base = OTHER; note = 2'-O-methyl-adenosine
  modified_base 19: mod_base = OTHER; note = 2'-O-methyl-guanosine
  modified_base 20: mod_base = OTHER; note = 2'-O-methyl-cytidine with phosphorothioate linkage
  modified_base 21: mod_base = OTHER; note = 2'-O-methyl-adenosine with phosphorothioate linkage
  modified_base 22: mod_base = OTHER; note = 2'-O-methyl-adenosine
tagactatgccctaacaagcaa

SEQ ID NO: 408 - RNA, 22 nt, synthetic construct
  source 1..22: mol_type = other RNA
  modified_base 1: mod_base = OTHER; note = 2'-O-methyl-uridine with phosphorothioate linkage
  modified_base 2: mod_base = OTHER; note = 2'-fluoro-adenosine with phosphorothioate linkage
  modified_base 3: mod_base = OTHER; note = 2'-fluoro-adenosine
  modified_base 4: mod_base = OTHER; note = 2'-O-methyl-guanosine
  modified_base 5: mod_base = OTHER; note = 2'-fluoro-adenosine
  modified_base 6: mod_base = OTHER; note = 2'-O-methyl-cytidine
  modified_base 7: mod_base = OTHER; note = 2'-fluoro-uridine
  modified_base 8: mod_base = OTHER; note = 2'-O-methyl-adenosine
  modified_base 9: mod_base = OTHER; note = 2'-O-methyl-uridine
  modified_base 10: mod_base = OTHER; note = 2'-fluoro-guanosine
  modified_base 11: mod_base = OTHER; note = 2'-O-methyl-cytidine
  modified_base 12: mod_base = OTHER; note = 2'-O-methyl-cytidine
  modified_base 13: mod_base = OTHER; note = 2'-O-methyl-cytidine
  modified_base 14: mod_base = OTHER; note = 2'-fluoro-uridine
  modified_base 15: mod_base = OTHER; note = 2'-O-methyl-adenosine
  modified_base 16: mod_base = OTHER; note = 2'-fluoro-adenosine
  modified_base 17: mod_base = OTHER; note = 2'-O-methyl-cytidine
  modified_base 18: mod_base = OTHER; note = 2'-O-methyl-adenosine
  modified_base 19: mod_base = OTHER; note = 2'-O-methyl-adenosine
  modified_base 20: mod_base = OTHER; note = 2'-O-methyl-guanosine with phosphorothioate linkage
  modified_base 21: mod_base = OTHER; note = 2'-O-methyl-cytidine with phosphorothioate linkage
  modified_base 22: mod_base = OTHER; note = 2'-O-methyl-adenosine
taagactatgccctaacaagca

SEQ ID NO: 409 - RNA, 22 nt, synthetic construct
  source 1..22: mol_type = other RNA
  modified_base 1: mod_base = OTHER; note = 2'-O-methyl-uridine with phosphorothioate linkage
  modified_base 2: mod_base = OTHER; note = 2'-fluoro-uridine with phosphorothioate linkage
  modified_base 3: mod_base = OTHER; note = 2'-fluoro-cytidine
  modified_base 4: mod_base = OTHER; note = 2'-O-methyl-adenosine
  modified_base 5: mod_base = OTHER; note = 2'-fluoro-adenosine
  modified_base 6: mod_base = OTHER; note = 2'-O-methyl-adenosine
  modified_base 7: mod_base = OTHER; note = 2'-fluoro-guanosine
  modified_base 8: mod_base = OTHER; note = 2'-O-methyl-adenosine
  modified_base 9: mod_base = OTHER; note = 2'-O-methyl-cytidine
  modified_base 10: mod_base = OTHER; note = 2'-fluoro-uridine
  modified_base 11: mod_base = OTHER; note = 2'-O-methyl-adenosine
  modified_base 12: mod_base = OTHER; note = 2'-O-methyl-uridine
  modified_base 13: mod_base = OTHER; note = 2'-O-methyl-guanosine
  modified_base 14: mod_base = OTHER; note = 2'-fluoro-cytidine
  modified_base 15: mod_base = OTHER; note = 2'-O-methyl-cytidine
  modified_base 16: mod_base = OTHER; note = 2'-fluoro-cytidine
  modified_base 17: mod_base = OTHER; note = 2'-O-methyl-uridine
  modified_base 18: mod_base = OTHER; note = 2'-O-methyl-adenosine
  modified_base 19: mod_base = OTHER; note = 2'-O-methyl-adenosine
  modified_base 20: mod_base = OTHER; note = 2'-O-methyl-cytidine with phosphorothioate linkage
  modified_base 21: mod_base = OTHER; note = 2'-O-methyl-adenosine with phosphorothioate linkage
  modified_base 22: mod_base = OTHER; note = 2'-O-methyl-adenosine
ttcaaagactatgccctaacaa

SEQ ID NO: 410 - RNA, 22 nt, synthetic construct
  source 1..22: mol_type = other RNA
  modified_base 1: mod_base = OTHER; note = 2'-O-methyl-uridine with phosphorothioate linkage
  modified_base 2: mod_base = OTHER; note = 2'-fluoro-uridine with phosphorothioate linkage
  modified_base 3: mod_base = OTHER; note = 2'-fluoro-uridine
  modified_base 4: mod_base = OTHER; note = 2'-O-methyl-cytidine
  modified_base 5: mod_base = OTHER; note = 2'-fluoro-adenosine
  modified_base 6: mod_base = OTHER; note = 2'-O-methyl-adenosine
  modified_base 7: mod_base = OTHER; note = 2'-fluoro-uridine
  modified_base 8: mod_base = OTHER; note = 2'-O-methyl-cytidine
  modified_base 9: mod_base = OTHER; note = 2'-O-methyl-adenosine
  modified_base 10: mod_base = OTHER; note = 2'-fluoro-adenosine
  modified_base 11: mod_base = OTHER; note = 2'-O-methyl-adenosine
  modified_base 12: mod_base = OTHER; note = 2'-O-methyl-guanosine
  modified_base 13: mod_base = OTHER; note = 2'-O-methyl-adenosine
  modified_base 14: mod_base = OTHER; note = 2'-fluoro-cytidine
  modified_base 15: mod_base = OTHER; note = 2'-O-methyl-uridine
  modified_base 16: mod_base = OTHER; note = 2'-fluoro-adenosine
  modified_base 17: mod_base = OTHER; note = 2'-O-methyl-uridine
  modified_base 18: mod_base = OTHER; note = 2'-O-methyl-guanosine
  modified_base 19: mod_base = OTHER; note = 2'-O-methyl-cytidine
  modified_base 20: mod_base = OTHER; note = 2'-O-methyl-cytidine with phosphorothioate linkage
  modified_base 21: mod_base = OTHER; note = 2'-O-methyl-cytidine with phosphorothioate linkage
  modified_base 22: mod_base = OTHER; note = 2'-O-methyl-uridine
tttcaatcaaagactatgccct

SEQ ID NO: 411 - RNA, 22 nt, synthetic construct
  source 1..22: mol_type = other RNA
  modified_base 1: mod_base = OTHER; note = 2'-O-methyl-uridine with phosphorothioate linkage
  modified_base 2: mod_base = OTHER; note = 2'-fluoro-uridine with phosphorothioate linkage
  modified_base 3: mod_base = OTHER; note = 2'-fluoro-uridine
  modified_base 4: mod_base = OTHER; note = 2'-O-methyl-uridine
  modified_base 5: mod_base = OTHER; note = 2'-fluoro-adenosine
  modified_base 6: mod_base = OTHER; note = 2'-O-methyl-guanosine
  modified_base 7: mod_base = OTHER; note = 2'-fluoro-adenosine
  modified_base 8: mod_base = OTHER; note = 2'-O-methyl-adenosine
  modified_base 9: mod_base = OTHER; note = 2'-O-methyl-guanosine
  modified_base 10: mod_base = OTHER; note = 2'-fluoro-cytidine
  modified_base 11: mod_base = OTHER; note = 2'-O-methyl-adenosine
  modified_base 12: mod_base = OTHER; note = 2'-O-methyl-guanosine
  modified_base 13: mod_base = OTHER; note = 2'-O-methyl-cytidine
  modified_base 14: mod_base = OTHER; note = 2'-fluoro-uridine
  modified_base 15: mod_base = OTHER; note = 2'-O-methyl-cytidine
  modified_base 16: mod_base = OTHER; note = 2'-fluoro-uridine
  modified_base 17: mod_base = OTHER; note = 2'-O-methyl-cytidine
  modified_base 18: mod_base = OTHER; note = 2'-O-methyl-adenosine
  modified_base 19: mod_base = OTHER; note = 2'-O-methyl-adenosine
  modified_base 20: mod_base = OTHER; note = 2'-O-methyl-guanosine with phosphorothioate linkage
  modified_base 21: mod_base = OTHER; note = 2'-O-methyl-adenosine with phosphorothioate linkage
  modified_base 22: mod_base = OTHER; note = 2'-O-methyl-uridine
ttttagaagcagctctcaagat

SEQ ID NO: 412 - RNA, 22 nt, synthetic construct
  source 1..22: mol_type = other RNA
  modified_base 1: mod_base = OTHER; note = 2'-O-methyl-uridine with phosphorothioate linkage
  modified_base 2: mod_base = OTHER; note = 2'-fluoro-adenosine with phosphorothioate linkage
  modified_base 3: mod_base = OTHER; note = 2'-fluoro-adenosine
  modified_base 4: mod_base = OTHER; note = 2'-O-methyl-uridine
  modified_base 5: mod_base = OTHER; note = 2'-fluoro-guanosine
  modified_base 6: mod_base = OTHER; note = 2'-O-methyl-uridine
  modified_base 7: mod_base = OTHER; note = 2'-fluoro-uridine
  modified_base 8: mod_base = OTHER; note = 2'-O-methyl-uridine
  modified_base 9: mod_base = OTHER; note = 2'-O-methyl-uridine
  modified_base 10: mod_base = OTHER; note = 2'-fluoro-guanosine
  modified_base 11: mod_base = OTHER; note = 2'-O-methyl-adenosine
  modified_base 12: mod_base = OTHER; note = 2'-O-methyl-adenosine
  modified_base 13: mod_base = OTHER; note = 2'-O-methyl-adenosine
  modified_base 14: mod_base = OTHER; note = 2'-fluoro-adenosine
  modified_base 15: mod_base = OTHER; note = 2'-O-methyl-adenosine
  modified_base 16: mod_base = OTHER; note = 2'-fluoro-uridine
  modified_base 17: mod_base = OTHER; note = 2'-O-methyl-guanosine
  modified_base 18: mod_base = OTHER; note = 2'-O-methyl-cytidine
  modified_base 19: mod_base = OTHER; note = 2'-O-methyl-cytidine
  modified_base 20: mod_base = OTHER; note = 2'-O-methyl-cytidine with phosphorothioate linkage
  modified_base 21: mod_base = OTHER; note = 2'-O-methyl-adenosine with phosphorothioate linkage
  modified_base 22: mod_base = OTHER; note = 2'-O-methyl-uridine
taatgttttgaaaaatgcccat

SEQ ID NO: 413 - RNA, 22 nt, synthetic construct
  source 1..22: mol_type = other RNA
  modified_base 1: mod_base = OTHER; note = 2'-O-methyl-uridine with phosphorothioate linkage
  modified_base 2: mod_base = OTHER; note = 2'-fluoro-uridine with phosphorothioate linkage
  modified_base 3: mod_base = OTHER; note = 2'-fluoro-adenosine
  modified_base 4: mod_base = OTHER; note = 2'-O-methyl-uridine
  modified_base 5: mod_base = OTHER; note = 2'-fluoro-adenosine
  modified_base 6: mod_base = OTHER; note = 2'-O-methyl-adenosine
  modified_base 7: mod_base = OTHER; note = 2'-fluoro-adenosine
  modified_base 8: mod_base = OTHER; note = 2'-O-methyl-guanosine
  modified_base 9: mod_base = OTHER; note = 2'-O-methyl-cytidine
  modified_base 10: mod_base = OTHER; note = 2'-fluoro-adenosine
  modified_base 11: mod_base = OTHER; note = 2'-O-methyl-adenosine
  modified_base 12: mod_base = OTHER; note = 2'-O-methyl-guanosine
  modified_base 13: mod_base = OTHER; note = 2'-O-methyl-guanosine
  modified_base 14: mod_base = OTHER; note = 2'-fluoro-cytidine
  modified_base 15: mod_base = OTHER; note = 2'-O-methyl-uridine
  modified_base 16: mod_base = OTHER; note = 2'-fluoro-adenosine
  modified_base 17: mod_base = OTHER; note = 2'-O-methyl-guanosine
  modified_base 18: mod_base = OTHER; note = 2'-O-methyl-adenosine
  modified_base 19: mod_base = OTHER; note = 2'-O-methyl-uridine
  modified_base 20: mod_base = OTHER; note = 2'-O-methyl-guanosine with phosphorothioate linkage
  modified_base 21: mod_base = OTHER; note = 2'-O-methyl-adenosine with phosphorothioate linkage
  modified_base 22: mod_base = OTHER; note = 2'-O-methyl-adenosine
ttataaagcaaggctagatgaa

SEQ ID NO: 414 - RNA, 22 nt, synthetic construct
  source 1..22: mol_type = other RNA
  modified_base 1: mod_base = OTHER; note = 2'-O-methyl-uridine with phosphorothioate linkage
  modified_base 2: mod_base = OTHER; note = 2'-fluoro-adenosine with phosphorothioate linkage
  modified_base 3: mod_base = OTHER; note = 2'-fluoro-adenosine
  modified_base 4: mod_base = OTHER; note = 2'-O-methyl-adenosine
  modified_base 5: mod_base = OTHER; note = 2'-fluoro-uridine
  modified_base 6: mod_base = OTHER; note = 2'-O-methyl-adenosine
  modified_base 7: mod_base = OTHER; note = 2'-fluoro-uridine
  modified_base 8: mod_base = OTHER; note = 2'-O-methyl-adenosine
  modified_base 9: mod_base = OTHER; note = 2'-O-methyl-adenosine
  modified_base 10: mod_base = OTHER; note = 2'-fluoro-adenosine
  modified_base 11: mod_base = OTHER; note = 2'-O-methyl-guanosine
  modified_base 12: mod_base = OTHER; note = 2'-O-methyl-cytidine
  modified_base 13: mod_base = OTHER; note = 2'-O-methyl-adenosine
  modified_base 14: mod_base = OTHER; note = 2'-fluoro-adenosine
  modified_base 15: mod_base = OTHER; note = 2'-O-methyl-guanosine
  modified_base 16: mod_base = OTHER; note = 2'-fluoro-guanosine
  modified_base 17: mod_base = OTHER; note = 2'-O-methyl-cytidine
  modified_base 18: mod_base = OTHER; note = 2'-O-methyl-uridine
  modified_base 19: mod_base = OTHER; note = 2'-O-methyl-adenosine
  modified_base 20: mod_base = OTHER; note = 2'-O-methyl-guanosine with phosphorothioate linkage
  modified_base 21: mod_base = OTHER; note = 2'-O-methyl-adenosine with phosphorothioate linkage
  modified_base 22: mod_base = OTHER; note = 2'-O-methyl-uridine
taaatataaagcaaggctagat

SEQ ID NO: 415 - RNA, 22 nt, synthetic construct
  source 1..22: mol_type = other RNA
  modified_base 1: mod_base = OTHER; note = 2'-O-methyl-uridine with phosphorothioate linkage
  modified_base 2: mod_base = OTHER; note = 2'-fluoro-adenosine with phosphorothioate linkage
  modified_base 3: mod_base = OTHER; note = 2'-fluoro-uridine
  modified_base 4: mod_base = OTHER; note = 2'-O-methyl-guanosine
  modified_base 5: mod_base = OTHER; note = 2'-fluoro-adenosine
  modified_base 6: mod_base = OTHER; note = 2'-O-methyl-adenosine
  modified_base 7: mod_base = OTHER; note = 2'-fluoro-adenosine
  modified_base 8: mod_base = OTHER; note = 2'-O-methyl-uridine
  modified_base 9: mod_base = OTHER; note = 2'-O-methyl-adenosine
  modified_base 10: mod_base = OTHER; note = 2'-fluoro-uridine
  modified_base 11: mod_base = OTHER; note = 2'-O-methyl-adenosine
  modified_base 12: mod_base = OTHER; note = 2'-O-methyl-adenosine
  modified_base 13: mod_base = OTHER; note = 2'-O-methyl-adenosine
  modified_base 14: mod_base = OTHER; note = 2'-fluoro-guanosine
  modified_base 15: mod_base = OTHER; note = 2'-O-methyl-cytidine
  modified_base 16: mod_base = OTHER; note = 2'-fluoro-adenosine
  modified_base 17: mod_base = OTHER; note = 2'-O-methyl-adenosine
  modified_base 18: mod_base = OTHER; note = 2'-O-methyl-guanosine
  modified_base 19: mod_base = OTHER; note = 2'-O-methyl-guanosine
  modified_base 20: mod_base = OTHER; note = 2'-O-methyl-cytidine with phosphorothioate linkage
  modified_base 21: mod_base = OTHER; note = 2'-O-methyl-uridine with phosphorothioate linkage
  modified_base 22: mod_base = OTHER; note = 2'-O-methyl-adenosine
tatgaaatataaagcaaggcta

SEQ ID NO: 416 - RNA, 22 nt, synthetic construct
  source 1..22: mol_type = other RNA
  modified_base 1: mod_base = OTHER; note = 2'-O-methyl-uridine with phosphorothioate linkage
  modified_base 2: mod_base = OTHER; note = 2'-fluoro-adenosine with phosphorothioate linkage
  modified_base 3: mod_base = OTHER; note = 2'-fluoro-uridine
  modified_base 4: mod_base = OTHER; note = 2'-O-methyl-adenosine
  modified_base 5: mod_base = OTHER; note = 2'-fluoro-guanosine
  modified_base 6: mod_base = OTHER; note = 2'-O-methyl-uridine
  modified_base 7: mod_base = OTHER; note = 2'-fluoro-guanosine
  modified_base 8: mod_base = OTHER; note = 2'-O-methyl-adenosine
  modified_base 9: mod_base = OTHER; note = 2'-O-methyl-guanosine
  modified_base 10: mod_base = OTHER; note = 2'-fluoro-guanosine
  modified_base 11: mod_base = OTHER; note = 2'-O-methyl-guanosine
  modified_base 12: mod_base = OTHER; note = 2'-O-methyl-adenosine
  modified_base 13: mod_base = OTHER; note = 2'-O-methyl-adenosine
  modified_base 14: mod_base = OTHER; note = 2'-fluoro-uridine
  modified_base 15: mod_base = OTHER; note = 2'-O-methyl-adenosine
  modified_base 16: mod_base = OTHER; note = 2'-fluoro-uridine
  modified_base 17: mod_base = OTHER; note = 2'-O-methyl-uridine
  modified_base 18: mod_base = OTHER; note = 2'-O-methyl-adenosine
  modified_base 19: mod_base = OTHER; note = 2'-O-methyl-adenosine
  modified_base 20: mod_base = OTHER; note = 2'-O-methyl-guanosine with phosphorothioate linkage
  modified_base 21: mod_base = OTHER; note = 2'-O-methyl-adenosine with phosphorothioate linkage
  modified_base 22: mod_base = OTHER; note = 2'-O-methyl-adenosine
tatagtgagggaatattaagaa

SEQ ID NO: 417 - RNA, 22 nt, synthetic construct
  source 1..22: mol_type = other RNA
  modified_base 1: mod_base = OTHER; note = 2'-O-methyl-uridine with phosphorothioate linkage
  modified_base 2: mod_base = OTHER; note = 2'-fluoro-uridine with phosphorothioate linkage
  modified_base 3: mod_base = OTHER; note = 2'-fluoro-uridine
  modified_base 4: mod_base = OTHER; note = 2'-O-methyl-cytidine
  modified_base 5: mod_base = OTHER; note = 2'-fluoro-uridine
  modified_base 6: mod_base = OTHER; note = 2'-O-methyl-cytidine
  modified_base 7: mod_base = OTHER; note = 2'-fluoro-uridine
  modified_base 8: mod_base = OTHER; note = 2'-O-methyl-uridine
  modified_base 9: mod_base = OTHER; note = 2'-O-methyl-uridine
  modified_base 10: mod_base = OTHER; note = 2'-fluoro-cytidine
  modified_base 11: mod_base = OTHER; note = 2'-O-methyl-adenosine
  modified_base 12: mod_base = OTHER; note = 2'-O-methyl-uridine
  modified_base 13: mod_base = OTHER; note = 2'-O-methyl-uridine
  modified_base 14: mod_base = OTHER; note = 2'-fluoro-adenosine
  modified_base 15: mod_base = OTHER; note = 2'-O-methyl-guanosine
  modified_base 16: mod_base = OTHER; note = 2'-fluoro-adenosine
  modified_base 17: mod_base = OTHER; note = 2'-O-methyl-adenosine
  modified_base 18: mod_base = OTHER; note = 2'-O-methyl-guanosine
  modified_base 19: mod_base = OTHER; note = 2'-O-methyl-guanosine
  modified_base 20: mod_base = OTHER; note = 2'-O-methyl-cytidine with phosphorothioate linkage
  modified_base 21: mod_base = OTHER; note = 2'-O-methyl-uridine with phosphorothioate linkage
  modified_base 22: mod_base = OTHER; note = 2'-O-methyl-adenosine
tttctctttcattagaaggcta

SEQ ID NO: 418 - RNA, 22 nt, synthetic construct
  source 1..22: mol_type = other RNA
  modified_base 1: mod_base = OTHER; note = 2'-O-methyl-uridine with phosphorothioate linkage
  modified_base 2: mod_base = OTHER; note = 2'-fluoro-uridine with phosphorothioate linkage
  modified_base 3: mod_base = OTHER; note = 2'-fluoro-adenosine
  modified_base 4: mod_base = OTHER; note = 2'-O-methyl-cytidine
  modified_base 5: mod_base = OTHER; note = 2'-fluoro-uridine
  modified_base 6: mod_base = OTHER; note = 2'-O-methyl-adenosine
  modified_base 7: mod_base = OTHER; note = 2'-fluoro-adenosine
  modified_base 8: mod_base = OTHER; note = 2'-O-methyl-guanosine
  modified_base 9: mod_base = OTHER; note = 2'-O-methyl-guanosine
  modified_base 10: mod_base = OTHER; note = 2'-fluoro-guanosine
  modified_base 11: mod_base = OTHER; note = 2'-O-methyl-adenosine
  modified_base 12: mod_base = OTHER; note = 2'-O-methyl-uridine
  modified_base 13: mod_base = OTHER; note = 2'-O-methyl-uridine
  modified_base 14: mod_base = OTHER; note = 2'-fluoro-cytidine
  modified_base 15: mod_base = OTHER; note = 2'-O-methyl-uridine
  modified_base 16: mod_base = OTHER; note = 2'-fluoro-cytidine
  modified_base 17: mod_base = OTHER; note = 2'-O-methyl-uridine
  modified_base 18: mod_base = OTHER; note = 2'-O-methyl-uridine
  modified_base 19: mod_base = OTHER; note = 2'-O-methyl-uridine
  modified_base 20: mod_base = OTHER; note = 2'-O-methyl-cytidine with phosphorothioate linkage
  modified_base 21: mod_base = OTHER; note = 2'-O-methyl-adenosine with phosphorothioate linkage
  modified_base 22: mod_base = OTHER; note = 2'-O-methyl-uridine
ttactaagggattctctttcat

SEQ ID NO: 419 - RNA, 22 nt, synthetic construct
  source 1..22: mol_type = other RNA
  modified_base 1: mod_base = OTHER; note = 2'-O-methyl-uridine with phosphorothioate linkage
  modified_base 2: mod_base = OTHER; note = 2'-fluoro-uridine with phosphorothioate linkage
  modified_base 3: mod_base = OTHER; note = 2'-fluoro-uridine
  modified_base 4: mod_base = OTHER; note = 2'-O-methyl-uridine
  modified_base 5: mod_base = OTHER; note = 2'-fluoro-adenosine
  modified_base 6: mod_base = OTHER; note = 2'-O-methyl-adenosine
  modified_base 7: mod_base = OTHER; note = 2'-fluoro-uridine
  modified_base 8: mod_base = OTHER; note = 2'-O-methyl-cytidine
  modified_base 9: mod_base = OTHER; note = 2'-O-methyl-uridine
  modified_base 10: mod_base = OTHER; note = 2'-fluoro-cytidine
  modified_base 11: mod_base = OTHER; note = 2'-O-methyl-uridine
  modified_base 12: mod_base = OTHER; note = 2'-O-methyl-guanosine
  modified_base 13: mod_base = OTHER; note = 2'-O-methyl-adenosine
  modified_base 14: mod_base = OTHER; note = 2'-fluoro-uridine
  modified_base 15: mod_base = OTHER; note = 2'-O-methyl-cytidine
  modified_base 16: mod_base = OTHER; note = 2'-fluoro-cytidine
  modified_base 17: mod_base = OTHER; note = 2'-O-methyl-uridine
  modified_base 18: mod_base = OTHER; note = 2'-O-methyl-uridine
  modified_base 19: mod_base = OTHER; note = 2'-O-methyl-guanosine
  modified_base 20: mod_base = OTHER; note = 2'-O-methyl-guanosine with phosphorothioate linkage
  modified_base 21: mod_base = OTHER; note = 2'-O-methyl-uridine with phosphorothioate linkage
  modified_base 22: mod_base = OTHER; note = 2'-O-methyl-uridine
ttttaatctctgatccttggtt

SEQ ID NO: 420 - RNA, 22 nt, synthetic construct
  source 1..22: mol_type = other RNA
  modified_base 1: mod_base = OTHER; note = 2'-O-methyl-uridine with phosphorothioate linkage
  modified_base 2: mod_base = OTHER; note = 2'-fluoro-uridine with phosphorothioate linkage
  modified_base 3: mod_base = OTHER; note = 2'-fluoro-adenosine
  modified_base 4: mod_base = OTHER; note = 2'-O-methyl-uridine
  modified_base 5: mod_base = OTHER; note = 2'-fluoro-cytidine
  modified_base 6: mod_base = OTHER; note = 2'-O-methyl-adenosine
  modified_base 7: mod_base = OTHER; note = 2'-fluoro-uridine
  modified_base 8: mod_base = OTHER; note = 2'-O-methyl-cytidine
  modified_base 9: mod_base = OTHER; note = 2'-O-methyl-adenosine
  modified_base 10: mod_base = OTHER; note = 2'-fluoro-uridine
  modified_base 11: mod_base = OTHER; note = 2'-O-methyl-cytidine
  modified_base 12: mod_base = OTHER; note = 2'-O-methyl-adenosine
  modified_base 13: mod_base = OTHER; note = 2'-O-methyl-uridine
  modified_base 14: mod_base = OTHER; note = 2'-fluoro-uridine
  modified_base 15: mod_base = OTHER; note = 2'-O-methyl-guanosine
  modified_base 16: mod_base = OTHER; note = 2'-fluoro-adenosine
  modified_base 17: mod_base = OTHER; note = 2'-O-methyl-adenosine
  modified_base 18: mod_base = OTHER; note = 2'-O-methyl-uridine
  modified_base 19: mod_base = OTHER; note = 2'-O-methyl-guanosine
  modified_base 20: mod_base = OTHER; note = 2'-O-methyl-guanosine with phosphorothioate linkage
  modified_base 21: mod_base = OTHER; note = 2'-O-methyl-cytidine with phosphorothioate linkage
  modified_base 22: mod_base = OTHER; note = 2'-O-methyl-adenosine
ttatcatcatcattgaatggca

SEQ ID NO: 421 - RNA, 22 nt, synthetic construct
  source 1..22: mol_type = other RNA
  modified_base 1: mod_base = OTHER; note = 2'-O-methyl-uridine with phosphorothioate linkage
  modified_base 2: mod_base = OTHER; note = 2'-fluoro-adenosine with phosphorothioate linkage
  modified_base 3: mod_base = OTHER; note = 2'-fluoro-uridine
  modified_base 4: mod_base = OTHER; note = 2'-O-methyl-guanosine
  modified_base 5: mod_base = OTHER; note = 2'-fluoro-adenosine
  modified_base 6: mod_base = OTHER; note = 2'-O-methyl-adenosine
  modified_base 7: mod_base = OTHER; note = 2'-fluoro-uridine
  modified_base 8: mod_base = OTHER; note = 2'-O-methyl-guanosine
  modified_base 9: mod_base = OTHER; note = 2'-O-methyl-cytidine
  modified_base 10: mod_base = OTHER; note = 2'-fluoro-cytidine
  modified_base 11: mod_base = OTHER; note = 2'-O-methyl-adenosine
  modified_base 12: mod_base = OTHER; note = 2'-O-methyl-adenosine
  modified_base 13: mod_base = OTHER; note = 2'-O-methyl-adenosine
  modified_base 14: mod_base = OTHER; note = 2'-fluoro-guanosine
  modified_base 15: mod_base = OTHER; note = 2'-O-methyl-adenosine
  modified_base 16: mod_base = OTHER; note = 2'-fluoro-cytidine
  modified_base 17: mod_base = OTHER; note = 2'-O-methyl-adenosine
  modified_base 18: mod_base = OTHER; note = 2'-O-methyl-adenosine
  modified_base 19: mod_base = OTHER; note = 2'-O-methyl-adenosine
  modified_base 20: mod_base = OTHER; note = 2'-O-methyl-cytidine with phosphorothioate linkage
  modified_base 21: mod_base = OTHER; note = 2'-O-methyl-uridine with phosphorothioate linkage
  modified_base 22: mod_base = OTHER; note = 2'-O-methyl-adenosine
tatgaatgccaaagacaaacta

SEQ ID NO: 422 - RNA, 22 nt, synthetic construct
  source 1..22: mol_type = other RNA
  modified_base 1: mod_base = OTHER; note = 2'-O-methyl-uridine with phosphorothioate linkage
  modified_base 2: mod_base = OTHER; note = 2'-fluoro-adenosine with phosphorothioate linkage
  modified_base 3: mod_base = OTHER; note = 2'-fluoro-adenosine
  modified_base 4: mod_base = OTHER; note = 2'-O-methyl-guanosine
  modified_base 5: mod_base = OTHER; note = 2'-fluoro-adenosine
  modified_base 6: mod_base = OTHER; note = 2'-O-methyl-adenosine
  modified_base 7: mod_base = OTHER; note = 2'-fluoro-guanosine
  modified_base 8: mod_base = OTHER; note = 2'-O-methyl-adenosine
  modified_base 9: mod_base = OTHER; note = 2'-O-methyl-uridine
  modified_base 10: mod_base = OTHER; note = 2'-fluoro-guanosine
  modified_base 11: mod_base = OTHER; note = 2'-O-methyl-adenosine
  modified_base 12: mod_base = OTHER; note = 2'-O-methyl-adenosine
  modified_base 13: mod_base = OTHER; note = 2'-O-methyl-uridine
  modified_base 14: mod_base = OTHER; note = 2'-fluoro-guanosine
  modified_base 15: mod_base = OTHER; note = 2'-O-methyl-cytidine
  modified_base 16: mod_base = OTHER; note = 2'-fluoro-cytidine
  modified_base 17: mod_base = OTHER; note = 2'-O-methyl-adenosine
  modified_base 18: mod_base = OTHER; note = 2'-O-methyl-adenosine
  modified_base 19: mod_base = OTHER; note = 2'-O-methyl-adenosine
  modified_base 20: mod_base = OTHER; note = 2'-O-methyl-guanosine with phosphorothioate linkage
  modified_base 21: mod_base = OTHER; note = 2'-O-methyl-adenosine with phosphorothioate linkage
  modified_base 22: mod_base = OTHER; note = 2'-O-methyl-cytidine
taagaagatgaatgccaaagac

SEQ ID NO: 423 - RNA, 22 nt, synthetic construct
  source 1..22: mol_type = other RNA
  modified_base 1: mod_base = OTHER; note = 2'-O-methyl-uridine with phosphorothioate linkage
  modified_base 2: mod_base = OTHER; note = 2'-fluoro-adenosine with phosphorothioate linkage
  modified_base 3: mod_base = OTHER; note = 2'-fluoro-cytidine
  modified_base 4: mod_base = OTHER; note = 2'-O-methyl-uridine
  modified_base 5: mod_base = OTHER; note = 2'-fluoro-adenosine
  modified_base 6: mod_base = OTHER; note = 2'-O-methyl-adenosine
  modified_base 7: mod_base = OTHER; note = 2'-fluoro-adenosine
  modified_base 8: mod_base = OTHER; note = 2'-O-methyl-adenosine
  modified_base 9: mod_base = OTHER; note = 2'-O-methyl-guanosine
  modified_base 10: mod_base = OTHER; note = 2'-fluoro-adenosine
  modified_base 11: mod_base = OTHER; note = 2'-O-methyl-adenosine
  modified_base 12: mod_base = OTHER; note = 2'-O-methyl-guanosine
  modified_base 13: mod_base = OTHER; note = 2'-O-methyl-adenosine
  modified_base 14: mod_base = OTHER; note = 2'-fluoro-uridine
  modified_base 15: mod_base = OTHER; note = 2'-O-methyl-guanosine
  modified_base 16: mod_base = OTHER; note = 2'-fluoro-adenosine
  modified_base 17: mod_base = OTHER; note = 2'-O-methyl-adenosine
  modified_base 18: mod_base = OTHER; note = 2'-O-methyl-uridine
  modified_base 19: mod_base = OTHER; note = 2'-O-methyl-guanosine
  modified_base 20: mod_base = OTHER; note = 2'-O-methyl-cytidine with phosphorothioate linkage
  modified_base 21: mod_base = OTHER; note = 2'-O-methyl-cytidine with phosphorothioate linkage
  modified_base 22: mod_base = OTHER; note = 2'-O-methyl-adenosine
tactaaaagaagatgaatgcca

SEQ ID NO: 424 - RNA, 22 nt, synthetic construct
  source 1..22: mol_type = other RNA
  modified_base 1: mod_base = OTHER; note = 2'-O-methyl-uridine with phosphorothioate linkage
  modified_base 2: mod_base = OTHER; note = 2'-fluoro-adenosine with phosphorothioate linkage
  modified_base 3: mod_base = OTHER; note = 2'-fluoro-cytidine
  modified_base 4: mod_base = OTHER; note = 2'-O-methyl-adenosine
  modified_base 5: mod_base = OTHER; note = 2'-fluoro-adenosine
  modified_base 6: mod_base = OTHER; note = 2'-O-methyl-adenosine
  modified_base 7: mod_base = OTHER; note = 2'-fluoro-uridine
  modified_base 8: mod_base = OTHER; note = 2'-O-methyl-adenosine
  modified_base 9: mod_base = OTHER; note = 2'-O-methyl-cytidine
  modified_base 10: mod_base = OTHER; note = 2'-fluoro-uridine
  modified_base 11: mod_base = OTHER; note = 2'-O-methyl-cytidine
  modified_base 12: mod_base = OTHER; note = 2'-O-methyl-uridine
  modified_base 13: mod_base = OTHER; note = 2'-O-methyl-adenosine
  modified_base 14: mod_base = OTHER; note = 2'-fluoro-uridine
  modified_base 15: mod_base = OTHER; note = 2'-O-methyl-adenosine
  modified_base 16: mod_base = OTHER; note = 2'-fluoro-guanosine
  modified_base 17: mod_base = OTHER; note = 2'-O-methyl-uridine
  modified_base 18: mod_base = OTHER; note = 2'-O-methyl-guanosine
  modified_base 19: mod_base = OTHER; note = 2'-O-methyl-cytidine
  modified_base 20: mod_base = OTHER; note = 2'-O-methyl-cytidine with phosphorothioate linkage
  modified_base 21: mod_base = OTHER; note = 2'-O-methyl-adenosine with phosphorothioate linkage
  modified_base 22: mod_base = OTHER; note = 2'-O-methyl-adenosine
tacaaatactctatagtgccaa

SEQ ID NO: 425 - RNA, 22 nt, synthetic construct
  source 1..22: mol_type = other RNA
  modified_base 1: mod_base = OTHER; note = 2'-O-methyl-uridine with phosphorothioate linkage
  modified_base 2: mod_base = OTHER; note = 2'-fluoro-adenosine with phosphorothioate linkage
  modified_base 3: mod_base = OTHER; note = 2'-fluoro-adenosine
  modified_base 4: mod_base = OTHER; note = 2'-O-methyl-adenosine
  modified_base 5: mod_base = OTHER; note = 2'-fluoro-guanosine
  modified_base 6: mod_base = OTHER; note = 2'-O-methyl-cytidine
  modified_base 7: mod_base = OTHER; note = 2'-fluoro-adenosine
  modified_base 8: mod_base = OTHER; note = 2'-O-methyl-adenosine
  modified_base 9: mod_base = OTHER; note = 2'-O-methyl-adenosine
  modified_base 10: mod_base = OTHER; note = 2'-fluoro-adenosine
  modified_base 11: mod_base = OTHER; note = 2'-O-methyl-guanosine
  modified_base 12: mod_base = OTHER; note = 2'-O-methyl-uridine
  modified_base 13: mod_base = OTHER; note = 2'-O-methyl-adenosine
  modified_base 14: mod_base = OTHER; note = 2'-fluoro-guanosine
  modified_base 15: mod_base = OTHER; note = 2'-O-methyl-adenosine
  modified_base 16: mod_base = OTHER; note = 2'-fluoro-cytidine
  modified_base 17: mod_base = OTHER; note = 2'-O-methyl-adenosine
  modified_base 18: mod_base = OTHER; note = 2'-O-methyl-uridine
  modified_base 19: mod_base = OTHER; note = 2'-O-methyl-uridine
  modified_base 20: mod_base = OTHER; note = 2'-O-methyl-cytidine with phosphorothioate linkage
  modified_base 21: mod_base = OTHER; note = 2'-O-methyl-uridine with phosphorothioate linkage
  modified_base 22: mod_base = OTHER; note = 2'-O-methyl-uridine
taaagcaaaagtagacattctt

SEQ ID NO: 426 - RNA, 22 nt, synthetic construct
  source 1..22: mol_type = other RNA
  modified_base 1: mod_base = OTHER; note = 2'-O-methyl-uridine with phosphorothioate linkage
  modified_base 2: mod_base = OTHER; note = 2'-fluoro-uridine with phosphorothioate linkage
  modified_base 3: mod_base = OTHER; note = 2'-fluoro-uridine
  modified_base 4: mod_base = OTHER; note = 2'-O-methyl-guanosine
  modified_base 5: mod_base = OTHER; note = 2'-fluoro-uridine
  modified_base 6: mod_base = OTHER; note = 2'-O-methyl-uridine
  modified_base 7: mod_base = OTHER; note = 2'-fluoro-adenosine
  modified_base 8: mod_base = OTHER; note = 2'-O-methyl-cytidine
  modified_base 9: mod_base = OTHER; note = 2'-O-methyl-cytidine
  modified_base 10: mod_base = OTHER; note = 2'-fluoro-uridine
  modified_base 11: mod_base = OTHER; note = 2'-O-methyl-adenosine
  modified_base 12: mod_base = OTHER; note = 2'-O-methyl-adenosine
  modified_base 13: mod_base = OTHER; note = 2'-O-methyl-uridine
  modified_base 14: mod_base = OTHER; note = 2'-fluoro-uridine
  modified_base 15: mod_base = OTHER; note = 2'-O-methyl-uridine
  modified_base 16: mod_base = OTHER; note = 2'-fluoro-uridine
  modified_base 17: mod_base = OTHER; note = 2'-O-methyl-guanosine
  modified_base 18: mod_base = OTHER; note = 2'-O-methyl-cytidine
  modified_base 19: mod_base = OTHER; note = 2'-O-methyl-uridine
  modified_base 20: mod_base = OTHER; note = 2'-O-methyl-guanosine with phosphorothioate linkage
  modified_base 21: mod_base = OTHER; note = 2'-O-methyl-uridine with phosphorothioate linkage
  modified_base 22: mod_base = OTHER; note = 2'-O-methyl-adenosine
tttgttacctaattttgctgta

SEQ ID NO: 427 - RNA, 22 nt, synthetic construct
  source 1..22: mol_type = other RNA
  modified_base 1: mod_base = OTHER; note = 2'-O-methyl-uridine with phosphorothioate linkage
  modified_base 2: mod_base = OTHER; note = 2'-fluoro-adenosine with phosphorothioate linkage
  modified_base 3: mod_base = OTHER; note = 2'-fluoro-adenosine
  modified_base 4: mod_base = OTHER; note = 2'-O-methyl-adenosine
  modified_base 5: mod_base = OTHER; note = 2'-fluoro-adenosine
  modified_base 6: mod_base = OTHER; note = 2'-O-methyl-guanosine
  modified_base 7: mod_base = OTHER; note = 2'-fluoro-uridine
  modified_base 8: mod_base = OTHER; note = 2'-O-methyl-adenosine
  modified_base 9: mod_base = OTHER; note = 2'-O-methyl-uridine
  modified_base 10: mod_base = OTHER; note = 2'-fluoro-guanosine
  modified_base 11: mod_base = OTHER; note = 2'-O-methyl-cytidine
  modified_base 12: mod_base = OTHER; note = 2'-O-methyl-uridine
  modified_base 13: mod_base = OTHER; note = 2'-O-methyl-guanosine
  modified_base 14: mod_base = OTHER; note = 2'-fluoro-guanosine
  modified_base 15: mod_base = OTHER; note = 2'-O-methyl-cytidine
  modified_base 16: mod_base = OTHER; note = 2'-fluoro-adenosine
  modified_base 17: mod_base = OTHER; note = 2'-O-methyl-guanosine
  modified_base 18: mod_base = OTHER; note = 2'-O-methyl-uridine
  modified_base 19: mod_base = OTHER; note = 2'-O-methyl-uridine
  modified_base 20: mod_base = OTHER; note = 2'-O-methyl-cytidine with phosphorothioate linkage
  modified_base 21: mod_base = OTHER; note = 2'-O-methyl-uridine with phosphorothioate linkage
  modified_base 22: mod_base = OTHER; note = 2'-O-methyl-adenosine
taaaagtatgctggcagttcta

SEQ ID NO: 428 - RNA, 22 nt, synthetic construct
  source 1..22: mol_type = other RNA
  modified_base 1: mod_base = OTHER; note = 2'-O-methyl-uridine with phosphorothioate linkage
  modified_base 2: mod_base = OTHER; note = 2'-fluoro-adenosine with phosphorothioate linkage
  modified_base 3: mod_base = OTHER; note = 2'-fluoro-adenosine
  modified_base 4: mod_base = OTHER; note = 2'-O-methyl-guanosine
  modified_base 5: mod_base = OTHER; note = 2'-fluoro-adenosine
  modified_base 6: mod_base = OTHER; note = 2'-O-methyl-guanosine
  modified_base 7: mod_base = OTHER; note = 2'-fluoro-adenosine
  modified_base 8: mod_base = OTHER; note = 2'-O-methyl-adenosine
  modified_base 9: mod_base = OTHER; note = 2'-O-methyl-adenosine
  modified_base 10: mod_base = OTHER; note = 2'-fluoro-adenosine
  modified_base 11: mod_base = OTHER; note = 2'-O-methyl-guanosine
  modified_base 12: mod_base = OTHER; note = 2'-O-methyl-uridine
  modified_base 13: mod_base = OTHER; note = 2'-O-methyl-adenosine
  modified_base 14: mod_base = OTHER; note = 2'-fluoro-uridine
  modified_base 15: mod_base = OTHER; note = 2'-O-methyl-guanosine
  modified_base 16: mod_base = OTHER; note = 2'-fluoro-cytidine
  modified_base 17: mod_base = OTHER; note = 2'-O-methyl-uridine
  modified_base 18: mod_base = OTHER; note = 2'-O-methyl-guanosine
  modified_base 19: mod_base = OTHER; note = 2'-O-methyl-guanosine
  modified_base 20: mod_base = OTHER; note = 2'-O-methyl-cytidine with phosphorothioate linkage
  modified_base 21: mod_base = OTHER; note = 2'-O-methyl-adenosine with phosphorothioate linkage
  modified_base 22: mod_base = OTHER; note = 2'-O-methyl-guanosine
taagagaaaagtatgctggcag

SEQ ID NO: 429 - RNA, 22 nt, synthetic construct
  source 1..22: mol_type = other RNA
  modified_base 1: mod_base = OTHER; note = 2'-O-methyl-uridine with phosphorothioate linkage
  modified_base 2: mod_base = OTHER; note = 2'-fluoro-uridine with phosphorothioate linkage
  modified_base 3: mod_base = OTHER; note = 2'-fluoro-cytidine
  modified_base 4: mod_base = OTHER; note = 2'-O-methyl-adenosine
  modified_base 5: mod_base = OTHER; note = 2'-fluoro-uridine
  modified_base 6: mod_base = OTHER; note = 2'-O-methyl-cytidine
  modified_base 7: mod_base = OTHER; note = 2'-fluoro-uridine
  modified_base 8: mod_base = OTHER; note = 2'-O-methyl-adenosine
  modified_base 9: mod_base = OTHER; note = 2'-O-methyl-cytidine
  modified_base 10: mod_base = OTHER; note = 2'-fluoro-adenosine
  modified_base 11: mod_base = OTHER; note = 2'-O-methyl-adenosine
  modified_base 12: mod_base = OTHER; note = 2'-O-methyl-cytidine
  modified_base 13: mod_base = OTHER; note = 2'-O-methyl-uridine
  modified_base 14: mod_base = OTHER; note = 2'-fluoro-guanosine
  modified_base 15: mod_base = OTHER; note = 2'-O-methyl-adenosine
  modified_base 16: mod_base = OTHER; note = 2'-fluoro-adenosine
  modified_base 17: mod_base = OTHER; note = 2'-O-methyl-adenosine
  modified_base 18: mod_base = OTHER; note = 2'-O-methyl-guanosine
  modified_base 19: mod_base = OTHER; note = 2'-O-methyl-adenosine
  modified_base 20: mod_base = OTHER; note = 2'-O-methyl-guanosine with phosphorothioate linkage
  modified_base 21: mod_base = OTHER; note = 2'-O-methyl-adenosine with phosphorothioate linkage
  modified_base 22: mod_base = OTHER; note = 2'-O-methyl-adenosine
ttcatctacaactgaaagagaa

SEQ ID NO: 430 - RNA, 22 nt, synthetic construct
  source 1..22: mol_type = other RNA
  modified_base 1: mod_base = OTHER; note = 2'-O-methyl-uridine with phosphorothioate linkage
  modified_base 2: mod_base = OTHER; note = 2'-fluoro-adenosine with phosphorothioate linkage
  modified_base 3: mod_base = OTHER; note = 2'-fluoro-uridine
  modified_base 4: mod_base = OTHER; note = 2'-O-methyl-uridine
  modified_base 5: mod_base = OTHER; note = 2'-fluoro-cytidine
  modified_base 6: mod_base = OTHER; note = 2'-O-methyl-adenosine
  modified_base 7: mod_base = OTHER; note = 2'-fluoro-uridine
  modified_base 8: mod_base = OTHER; note = 2'-O-methyl-cytidine
  modified_base 9: mod_base = OTHER; note = 2'-O-methyl-uridine
  modified_base 10: mod_base = OTHER; note = 2'-fluoro-adenosine
  modified_base 11: mod_base = OTHER; note = 2'-O-methyl-cytidine
  modified_base 12: mod_base = OTHER; note = 2'-O-methyl-adenosine
  modified_base 13: mod_base = OTHER; note = 2'-O-methyl-adenosine
  modified_base 14: mod_base = OTHER; note = 2'-fluoro-cytidine
  modified_base 15: mod_base = OTHER; note = 2'-O-methyl-uridine
  modified_base 16: mod_base = OTHER; note = 2'-fluoro-guanosine
  modified_base 17: mod_base = OTHER; note = 2'-O-methyl-adenosine
  modified_base 18: mod_base = OTHER; note = 2'-O-methyl-adenosine
  modified_base 19: mod_base = OTHER; note = 2'-O-methyl-adenosine
  modified_base 20: mod_base = OTHER; note = 2'-O-methyl-guanosine with phosphorothioate linkage
  modified_base 21: mod_base = OTHER; note = 2'-O-methyl-adenosine with phosphorothioate linkage
  modified_base 22: mod_base = OTHER; note = 2'-O-methyl-guanosine
tattcatctacaactgaaagag

SEQ ID NO: 431 - RNA, 22 nt, synthetic construct
  source 1..22: mol_type = other RNA
  modified_base 1: mod_base = OTHER; note = 2'-O-methyl-uridine with phosphorothioate linkage
  modified_base 2: mod_base = OTHER; note = 2'-fluoro-uridine with phosphorothioate linkage
  modified_base 3: mod_base = OTHER; note = 2'-fluoro-adenosine
  modified_base 4: mod_base = OTHER; note = 2'-O-methyl-uridine
  modified_base 5: mod_base = OTHER; note = 2'-fluoro-guanosine
  modified_base 6: mod_base = OTHER; note = 2'-O-methyl-uridine
  modified_base 7: mod_base = OTHER; note = 2'-fluoro-cytidine
  modified_base 8: mod_base = OTHER; note = 2'-O-methyl-uridine
  modified_base 9: mod_base = OTHER; note = 2'-O-methyl-guanosine
  modified_base 10: mod_base = OTHER; note = 2'-fluoro-guanosine
  modified_base 11: mod_base = OTHER; note = 2'-O-methyl-guanosine
  modified_base 12: mod_base = OTHER; note = 2'-O-methyl-adenosine
  modified_base 13: mod_base = OTHER; note = 2'-O-methyl-guanosine
  modified_base 14: mod_base = OTHER; note = 2'-fluoro-cytidine
  modified_base 15: mod_base = OTHER; note = 2'-O-methyl-cytidine
  modified_base 16: mod_base = OTHER; note = 2'-fluoro-adenosine
  modified_base 17: mod_base = OTHER; note = 2'-O-methyl-adenosine
  modified_base 18: mod_base = OTHER; note = 2'-O-methyl-uridine
  modified_base 19: mod_base = OTHER; note = 2'-O-methyl-uridine
  modified_base 20: mod_base = OTHER; note = 2'-O-methyl-guanosine with phosphorothioate linkage
  modified_base 21: mod_base = OTHER; note = 2'-O-methyl-cytidine with phosphorothioate linkage
  modified_base 22: mod_base = OTHER; note = 2'-O-methyl-adenosine
ttatgtctgggagccaattgca

SEQ ID NO: 432 - RNA, 22 nt, synthetic construct
  source 1..22: mol_type = other RNA
  modified_base 1: mod_base = OTHER; note = 2'-O-methyl-uridine with phosphorothioate linkage
  modified_base 2: mod_base = OTHER; note = 2'-fluoro-adenosine with phosphorothioate linkage
  modified_base 3: mod_base = OTHER; note = 2'-fluoro-adenosine
  modified_base 4: mod_base = OTHER; note = 2'-O-methyl-adenosine
  modified_base 5: mod_base = OTHER; note = 2'-fluoro-adenosine
  modified_base 6: mod_base = OTHER; note = 2'-O-methyl-uridine
  modified_base 7: mod_base = OTHER; note = 2'-fluoro-uridine
  modified_base 8: mod_base = OTHER; note = 2'-O-methyl-adenosine
  modified_base 9: mod_base = OTHER; note = 2'-O-methyl-uridine
  modified_base 10: mod_base = OTHER; note = 2'-fluoro-guanosine
  modified_base 11: mod_base = OTHER; note = 2'-O-methyl-uridine
  modified_base 12: mod_base = OTHER; note = 2'-O-methyl-cytidine
  modified_base 13: mod_base = OTHER; note = 2'-O-methyl-uridine
  modified_base 14: mod_base = OTHER; note = 2'-fluoro-guanosine
  modified_base 15: mod_base = OTHER; note = 2'-O-methyl-guanosine
  modified_base 16: mod_base = OTHER; note = 2'-fluoro-guanosine
  modified_base 17: mod_base = OTHER; note = 2'-O-methyl-adenosine
  modified_base 18: mod_base = OTHER; note = 2'-O-methyl-guanosine
  modified_base 19: mod_base = OTHER; note = 2'-O-methyl-cytidine
  modified_base 20: mod_base = OTHER; note = 2'-O-methyl-cytidine with phosphorothioate linkage
  modified_base 21: mod_base = OTHER; note = 2'-O-methyl-adenosine with phosphorothioate linkage
  modified_base 22: mod_base = OTHER; note = 2'-O-methyl-adenosine
taaaattatgtctgggagccaa

SEQ ID NO: 433 - RNA, 22 nt, synthetic construct
  source 1..22: mol_type = other RNA
  modified_base 1: mod_base = OTHER; note = 2'-O-methyl-uridine with phosphorothioate linkage
  modified_base 2: mod_base = OTHER; note = 2'-fluoro-adenosine with phosphorothioate linkage
  modified_base 3: mod_base = OTHER; note = 2'-fluoro-uridine
  modified_base 4: mod_base = OTHER; note = 2'-O-methyl-adenosine
  modified_base 5: mod_base = OTHER; note = 2'-fluoro-uridine
  modified_base 6: mod_base = OTHER; note = 2'-O-methyl-adenosine
  modified_base 7: mod_base = OTHER; note = 2'-fluoro-adenosine
  modified_base 8: mod_base = OTHER; note = 2'-O-methyl-guanosine
  modified_base 9: mod_base = OTHER; note = 2'-O-methyl-cytidine
  modified_base 10: mod_base = OTHER; note = 2'-fluoro-cytidine
  modified_base 11: mod_base = OTHER; note = 2'-O-methyl-adenosine
  modified_base 12: mod_base = OTHER; note = 2'-O-methyl-adenosine
  modified_base 13: mod_base = OTHER; note = 2'-O-methyl-uridine
  modified_base 14: mod_base = OTHER; note = 2'-fluoro-adenosine
  modified_base 15: mod_base = OTHER; note = 2'-O-methyl-adenosine
  modified_base 16: mod_base = OTHER; note = 2'-fluoro-guanosine
  modified_base 17: mod_base = OTHER; note = 2'-O-methyl-adenosine
  modified_base 18: mod_base = OTHER; note = 2'-O-methyl-uridine
  modified_base 19: mod_base = OTHER; note = 2'-O-methyl-guanosine
  modified_base 20: mod_base = OTHER; note = 2'-O-methyl-cytidine with phosphorothioate linkage
  modified_base 21: mod_base = OTHER; note = 2'-O-methyl-uridine with phosphorothioate linkage
  modified_base 22: mod_base = OTHER; note = 2'-O-methyl-uridine
tatataagccaataagatgctt

SEQ ID NO: 434 - RNA, 22 nt, synthetic construct
  source 1..22: mol_type = other RNA
  modified_base 1: mod_base = OTHER; note = 2'-O-methyl-uridine with phosphorothioate linkage
  modified_base 2: mod_base = OTHER; note = 2'-fluoro-uridine with phosphorothioate linkage
  modified_base 3: mod_base = OTHER; note = 2'-fluoro-guanosine
  modified_base 4: mod_base = OTHER; note = 2'-O-methyl-uridine
  modified_base 5: mod_base = OTHER; note = 2'-fluoro-adenosine
  modified_base 6: mod_base = OTHER; note = 2'-O-methyl-uridine
  modified_base 7: mod_base = OTHER; note = 2'-fluoro-adenosine
  modified_base 8: mod_base = OTHER; note = 2'-O-methyl-adenosine
  modified_base 9: mod_base = OTHER; note = 2'-O-methyl-guanosine
  modified_base 10: mod_base = OTHER; note = 2'-fluoro-cytidine
  modified_base 11: mod_base = OTHER; note = 2'-O-methyl-cytidine
  modified_base 12: mod_base = OTHER; note = 2'-O-methyl-adenosine
  modified_base 13: mod_base = OTHER; note = 2'-O-methyl-guanosine
  modified_base 14: mod_base = OTHER; note = 2'-fluoro-adenosine
  modified_base 15: mod_base = OTHER; note = 2'-O-methyl-cytidine
  modified_base 16: mod_base = OTHER; note = 2'-fluoro-cytidine
  modified_base 17: mod_base = OTHER; note = 2'-O-methyl-adenosine
  modified_base 18: mod_base = OTHER; note = 2'-O-methyl-uridine
  modified_base 19: mod_base = OTHER; note = 2'-O-methyl-uridine
  modified_base 20: mod_base = OTHER; note = 2'-O-methyl-cytidine with phosphorothioate linkage
  modified_base 21: mod_base = OTHER; note = 2'-O-methyl-uridine with phosphorothioate linkage
  modified_base 22: mod_base = OTHER; note = 2'-O-methyl-uridine
ttgtataagccagaccattctt

SEQ ID NO: 435 - RNA, 22 nt, synthetic construct
  source 1..22: mol_type = other RNA
  modified_base 1: mod_base = OTHER; note = 2'-O-methyl-uridine with phosphorothioate linkage
  modified_base 2: mod_base = OTHER; note = 2'-fluoro-adenosine with phosphorothioate linkage
  modified_base 3: mod_base = OTHER; note = 2'-fluoro-adenosine
  modified_base 4: mod_base = OTHER; note = 2'-O-methyl-guanosine
  modified_base 5: mod_base = OTHER; note = 2'-fluoro-adenosine
  modified_base 6: mod_base = OTHER; note = 2'-O-methyl-uridine
  modified_base 7: mod_base = OTHER; note = 2'-fluoro-guanosine
  modified_base 8: mod_base = OTHER; note = 2'-O-methyl-uridine
  modified_base 9: mod_base = OTHER; note = 2'-O-methyl-adenosine
  modified_base 10: mod_base = OTHER; note = 2'-fluoro-uridine
  modified_base 11: mod_base = OTHER; note = 2'-O-methyl-adenosine
  modified_base 12: mod_base = OTHER; note = 2'-O-methyl-adenosine
  modified_base 13: mod_base = OTHER; note = 2'-O-methyl-guanosine
  modified_base 14: mod_base = OTHER; note = 2'-fluoro-cytidine
  modified_base 15: mod_base = OTHER; note = 2'-O-methyl-cytidine
  modified_base 16: mod_base = OTHER; note = 2'-fluoro-adenosine
  modified_base 17: mod_base = OTHER; note = 2'-O-methyl-guanosine
  modified_base 18: mod_base = OTHER; note = 2'-O-methyl-adenosine
  modified_base 19: mod_base = OTHER; note = 2'-O-methyl-cytidine
  modified_base 20: mod_base = OTHER; note = 2'-O-methyl-cytidine with phosphorothioate linkage
  modified_base 21: mod_base = OTHER; note = 2'-O-methyl-adenosine with phosphorothioate linkage
  modified_base 22: mod_base = OTHER; note = 2'-O-methyl-uridine
taagatgtataagccagaccat

SEQ ID NO: 436 - RNA, 22 nt, synthetic construct
  source 1..22: mol_type = other RNA
  modified_base 1: mod_base = OTHER; note = 2'-O-methyl-uridine with phosphorothioate linkage
  modified_base 2: mod_base = OTHER; note = 2'-fluoro-adenosine with phosphorothioate linkage
  modified_base 3: mod_base = OTHER; note = 2'-fluoro-uridine
  modified_base 4: mod_base = OTHER; note = 2'-O-methyl-guanosine
  modified_base 5: mod_base = OTHER; note = 2'-fluoro-cytidine
  modified_base 6: mod_base = OTHER; note = 2'-O-methyl-adenosine
  modified_base 7: mod_base = OTHER; note = 2'-fluoro-uridine
  modified_base 8: mod_base = OTHER; note = 2'-O-methyl-adenosine
  modified_base 9: mod_base = OTHER; note = 2'-O-methyl-guanosine
  modified_base 10: mod_base = OTHER; note = 2'-fluoro-adenosine
  modified_base 11: mod_base = OTHER; note = 2'-O-methyl-adenosine
  modified_base 12: mod_base = OTHER; note = 2'-O-methyl-uridine
  modified_base 13: mod_base = OTHER; note = 2'-O-methyl-guanosine
  modified_base 14: mod_base = OTHER; note = 2'-fluoro-adenosine
  modified_base 15: mod_base = OTHER; note = 2'-O-methyl-adenosine
  modified_base 16: mod_base = OTHER; note = 2'-fluoro-adenosine
  modified_base 17: mod_base = OTHER; note = 2'-O-methyl-adenosine
  modified_base 18: mod_base = OTHER; note = 2'-O-methyl-cytidine
  modified_base 19: mod_base = OTHER; note = 2'-O-methyl-uridine
  modified_base 20: mod_base = OTHER; note = 2'-O-methyl-guanosine with phosphorothioate linkage
  modified_base 21: mod_base = OTHER; note = 2'-O-methyl-uridine with phosphorothioate linkage
  modified_base 22: mod_base = OTHER; note = 2'-O-methyl-adenosine
tatgcatagaatgaaaactgta

SEQ ID NO: 437 - RNA, 22 nt, synthetic construct
  source 1..22: mol_type = other RNA
  modified_base 1: mod_base = OTHER; note = 2'-O-methyl-uridine with phosphorothioate linkage
  modified_base 2: mod_base = OTHER; note = 2'-fluoro-uridine with phosphorothioate linkage
  modified_base 3: mod_base = OTHER; note = 2'-fluoro-adenosine
  modified_base 4: mod_base = OTHER; note = 2'-O-methyl-adenosine
  modified_base 5: mod_base = OTHER; note = 2'-fluoro-uridine
  modified_base 6: mod_base = OTHER; note = 2'-O-methyl-uridine
  modified_base 7: mod_base = OTHER; note = 2'-fluoro-adenosine
  modified_base 8: mod_base = OTHER; note = 2'-O-methyl-guanosine
  modified_base 9: mod_base = OTHER; note = 2'-O-methyl-cytidine
  modified_base 10: mod_base = OTHER; note = 2'-fluoro-uridine
  modified_base 11: mod_base = OTHER; note = 2'-O-methyl-cytidine
  modified_base 12: mod_base = OTHER; note = 2'-O-methyl-cytidine
  modified_base 13: mod_base = OTHER; note = 2'-O-methyl-adenosine
  modified_base 14: mod_base = OTHER; note = 2'-fluoro-uridine
  modified_base 15: mod_base = OTHER; note = 2'-O-methyl-guanosine
  modified_base 16: mod_base = OTHER; note = 2'-fluoro-cytidine
  modified_base 17: mod_base = OTHER; note = 2'-O-methyl-adenosine
  modified_base 18: mod_base = OTHER; note = 2'-O-methyl-uridine
  modified_base 19: mod_base = OTHER; note = 2'-O-methyl-adenosine
  modified_base 20: mod_base = OTHER; note = 2'-O-methyl-guanosine with phosphorothioate linkage
  modified_base 21: mod_base = OTHER; note = 2'-O-methyl-adenosine with phosphorothioate linkage
  modified_base 22: mod_base = OTHER; note = 2'-O-methyl-adenosine
ttaattagctccatgcatagaa

SEQ ID NO: 438 - RNA, 22 nt, synthetic construct
  source 1..22: mol_type = other RNA
  modified_base 1: mod_base = OTHER; note = 2'-O-methyl-uridine with phosphorothioate linkage
  modified_base 2: mod_base = OTHER; note = 2'-fluoro-uridine with phosphorothioate linkage
  modified_base 3: mod_base = OTHER; note = 2'-fluoro-cytidine
  modified_base 4: mod_base = OTHER; note = 2'-O-methyl-adenosine
  modified_base 5: mod_base = OTHER; note = 2'-fluoro-guanosine
  modified_base 6: mod_base = OTHER; note = 2'-O-methyl-uridine
  modified_base 7: mod_base = OTHER; note = 2'-fluoro-adenosine
  modified_base 8: mod_base = OTHER; note = 2'-O-methyl-adenosine
  modified_base 9: mod_base = OTHER; note = 2'-O-methyl-uridine
  modified_base 10: mod_base = OTHER; note = 2'-fluoro-uridine
  modified_base 11: mod_base = OTHER; note = 2'-O-methyl-adenosine
  modified_base 12: mod_base = OTHER; note = 2'-O-methyl-guanosine
  modified_base 13: mod_base = OTHER; note = 2'-O-methyl-cytidine
  modified_base 14: mod_base = OTHER; note = 2'-fluoro-uridine
  modified_base 15: mod_base = OTHER; note = 2'-O-methyl-cytidine
  modified_base 16: mod_base = OTHER; note = 2'-fluoro-cytidine
  modified_base 17: mod_base = OTHER; note = 2'-O-methyl-adenosine
  modified_base 18: mod_base = OTHER; note = 2'-O-methyl-uridine
  modified_base 19: mod_base = OTHER; note = 2'-O-methyl-guanosine
  modified_base 20: mod_base = OTHER; note = 2'-O-methyl-cytidine with phosphorothioate linkage
  modified_base 21: mod_base = OTHER; note = 2'-O-methyl-adenosine with phosphorothioate linkage
  modified_base 22: mod_base = OTHER; note = 2'-O-methyl-uridine
ttcagtaattagctccatgcat

SEQ ID NO: 439 - RNA, 22 nt, synthetic construct
  source 1..22: mol_type = other RNA
  modified_base 1: mod_base = OTHER; note = 2'-O-methyl-uridine with phosphorothioate linkage
  modified_base 2: mod_base = OTHER; note = 2'-fluoro-adenosine with phosphorothioate linkage
  modified_base 3: mod_base = OTHER; note = 2'-fluoro-adenosine
  modified_base 4: mod_base = OTHER; note = 2'-O-methyl-adenosine
  modified_base 5: mod_base = OTHER; note = 2'-fluoro-guanosine
  modified_base 6: mod_base = OTHER; note = 2'-O-methyl-uridine
  modified_base 7: mod_base = OTHER; note = 2'-fluoro-cytidine
  modified_base 8: mod_base = OTHER; note = 2'-O-methyl-adenosine
  modified_base 9: mod_base = OTHER; note = 2'-O-methyl-guanosine
  modified_base 10: mod_base = OTHER; note = 2'-fluoro-uridine
  modified_base 11: mod_base = OTHER; note = 2'-O-methyl-adenosine
  modified_base 12: mod_base = OTHER; note = 2'-O-methyl-adenosine
  modified_base 13: mod_base = OTHER; note = 2'-O-methyl-uridine
  modified_base 14: mod_base = OTHER; note = 2'-fluoro-uridine
  modified_base 15: mod_base = OTHER; note = 2'-O-methyl-adenosine
  modified_base 16: mod_base = OTHER; note = 2'-fluoro-guanosine
  modified_base 17: mod_base = OTHER; note = 2'-O-methyl-cytidine
  modified_base 18: mod_base = OTHER; note = 2'-O-methyl-uridine
  modified_base 19: mod_base = OTHER; note = 2'-O-methyl-cytidine
  modified_base 20: mod_base = OTHER; note = 2'-O-methyl-cytidine with phosphorothioate linkage
  modified_base 21: mod_base = OTHER; note = 2'-O-methyl-adenosine with phosphorothioate linkage
  modified_base 22: mod_base = OTHER; note = 2'-O-methyl-uridine
taaagtcagtaattagctccat

SEQ ID NO: 440 - RNA, 22 nt, synthetic construct
  source 1..22: mol_type = other RNA
  modified_base 1: mod_base = OTHER; note = 2'-O-methyl-uridine with phosphorothioate linkage
  modified_base 2: mod_base = OTHER; note = 2'-fluoro-adenosine with phosphorothioate linkage
  modified_base 3: mod_base = OTHER; note = 2'-fluoro-uridine
  modified_base 4: mod_base = OTHER; note = 2'-O-methyl-uridine
  modified_base 5: mod_base = OTHER; note = 2'-fluoro-adenosine
  modified_base 6: mod_base = OTHER; note = 2'-O-methyl-uridine
  modified_base 7: mod_base = OTHER; note = 2'-fluoro-uridine
  modified_base 8: mod_base = OTHER; note = 2'-O-methyl-uridine
  modified_base 9: mod_base = OTHER; note = 2'-O-methyl-adenosine
  modified_base 10: mod_base = OTHER; note = 2'-fluoro-guanosine
  modified_base 11: mod_base = OTHER; note = 2'-O-methyl-cytidine
  modified_base 12: mod_base = OTHER; note = 2'-O-methyl-cytidine
  modified_base 13: mod_base = OTHER; note = 2'-O-methyl-uridine
  modified_base 14: mod_base = OTHER; note = 2'-fluoro-adenosine
  modified_base 15: mod_base = OTHER; note = 2'-O-methyl-uridine
  modified_base 16: mod_base = OTHER; note = 2'-fluoro-guanosine
  modified_base 17: mod_base = OTHER; note = 2'-O-methyl-guanosine
  modified_base 18: mod_base = OTHER; note = 2'-O-methyl-adenosine
  modified_base 19: mod_base = OTHER; note = 2'-O-methyl-adenosine
  modified_base 20: mod_base = OTHER; note = 2'-O-methyl-guanosine with phosphorothioate linkage
  modified_base 21: mod_base = OTHER; note = 2'-O-methyl-adenosine with phosphorothioate linkage
  modified_base 22: mod_base = OTHER; note = 2'-O-methyl-adenosine
tattatttagcctatggaagaa

SEQ ID NO: 441 - RNA, 22 nt, synthetic construct
  source 1..22: mol_type = other RNA
  modified_base 1: mod_base = OTHER; note = 2'-O-methyl-uridine with phosphorothioate linkage
  modified_base 2: mod_base = OTHER; note = 2'-fluoro-adenosine with phosphorothioate linkage
  modified_base 3: mod_base = OTHER; note = 2'-fluoro-adenosine
  modified_base 4: mod_base = OTHER; note = 2'-O-methyl-uridine
  modified_base 5: mod_base = OTHER; note = 2'-fluoro-adenosine
  modified_base 6: mod_base = OTHER; note = 2'-O-methyl-uridine
  modified_base 7: mod_base = OTHER; note = 2'-fluoro-uridine
  modified_base 8: mod_base = OTHER; note = 2'-O-methyl-uridine
  modified_base 9: mod_base = OTHER; note = 2'-O-methyl-uridine
  modified_base 10: mod_base = OTHER; note = 2'-fluoro-guanosine
  modified_base 11: mod_base = OTHER; note = 2'-O-methyl-guanosine
  modified_base 12: mod_base = OTHER; note = 2'-O-methyl-cytidine
  modified_base 13: mod_base = OTHER; note = 2'-O-methyl-uridine
  modified_base 14: mod_base = OTHER; note = 2'-fluoro-cytidine
  modified_base 15: mod_base = OTHER; note = 2'-O-methyl-adenosine
  modified_base 16: mod_base = OTHER; note = 2'-fluoro-guanosine
  modified_base 17: mod_base = OTHER; note = 2'-O-methyl-adenosine
  modified_base 18: mod_base = OTHER; note = 2'-O-methyl-uridine
  modified_base 19: mod_base = OTHER; note = 2'-O-methyl-adenosine
  modified_base 20: mod_base = OTHER; note = 2'-O-methyl-cytidine with phosphorothioate linkage
  modified_base 21: mod_base = OTHER; note = 2'-O-methyl-uridine with phosphorothioate linkage
  modified_base 22: mod_base = OTHER; note = 2'-O-methyl-cytidine
taatattttggctcagatactc

SEQ ID NO: 442 - RNA, 22 nt, synthetic construct
  source 1..22: mol_type = other RNA
  modified_base 1: mod_base = OTHER; note = 2'-O-methyl-uridine with phosphorothioate linkage
  modified_base 2: mod_base = OTHER; note = 2'-fluoro-adenosine with phosphorothioate linkage
  modified_base 3: mod_base = OTHER; note = 2'-fluoro-guanosine
  modified_base 4: mod_base = OTHER; note = 2'-O-methyl-uridine
  modified_base 5: mod_base = OTHER; note = 2'-fluoro-uridine
  modified_base 6: mod_base = OTHER; note = 2'-O-methyl-uridine
  modified_base 7: mod_base = OTHER; note = 2'-fluoro-guanosine
  modified_base 8: mod_base = OTHER; note = 2'-O-methyl-adenosine
  modified_base 9: mod_base = OTHER; note = 2'-O-methyl-adenosine
  modified_base 10: mod_base = OTHER; note = 2'-fluoro-uridine
  modified_base 11: mod_base = OTHER; note = 2'-O-methyl-adenosine
  modified_base 12: mod_base = OTHER; note = 2'-O-methyl-adenosine
  modified_base 13: mod_base = OTHER; note = 2'-O-methyl-uridine
  modified_base 14: mod_base = OTHER; note = 2'-fluoro-cytidine
  modified_base 15: mod_base = OTHER; note = 2'-O-methyl-uridine
  modified_base 16: mod_base = OTHER; note = 2'-fluoro-uridine
  modified_base 17: mod_base = OTHER; note = 2'-O-methyl-cytidine
  modified_base 18: mod_base = OTHER; note = 2'-O-methyl-uridine
  modified_base 19: mod_base = OTHER; note = 2'-O-methyl-cytidine
  modified_base 20: mod_base = OTHER; note = 2'-O-methyl-cytidine with phosphorothioate linkage
  modified_base 21: mod_base = OTHER; note = 2'-O-methyl-adenosine with phosphorothioate linkage
  modified_base 22: mod_base = OTHER; note = 2'-O-methyl-guanosine
tagtttgaataatcttctccag

SEQ ID NO: 443 - RNA, 22 nt, synthetic construct
  source 1..22: mol_type = other RNA
  modified_base 1: mod_base = OTHER; note = 2'-O-methyl-uridine with phosphorothioate linkage
  modified_base 2: mod_base = OTHER; note = 2'-fluoro-adenosine with phosphorothioate linkage
  modified_base 3: mod_base = OTHER; note = 2'-fluoro-adenosine
  modified_base 4: mod_base = OTHER; note = 2'-O-methyl-adenosine
  modified_base 5: mod_base = OTHER; note = 2'-fluoro-guanosine
  modified_base 6: mod_base = OTHER; note = 2'-O-methyl-uridine
  modified_base 7: mod_base = OTHER; note = 2'-fluoro-cytidine
  modified_base 8: mod_base = OTHER; note = 2'-O-methyl-adenosine
  modified_base 9: mod_base = OTHER; note = 2'-O-methyl-adenosine
  modified_base 10: mod_base = OTHER; note = 2'-fluoro-uridine
  modified_base 11: mod_base = OTHER; note = 2'-O-methyl-cytidine
  modified_base 12: mod_base = OTHER; note = 2'-O-methyl-cytidine
  modified_base 13: mod_base = OTHER; note = 2'-O-methyl-adenosine
  modified_base 14: mod_base = OTHER; note = 2'-fluoro-adenosine
  modified_base 15: mod_base = OTHER; note = 2'-O-methyl-adenosine
  modified_base 16: mod_base = OTHER; note = 2'-fluoro-adenosine
  modified_base 17: mod_base = OTHER; note = 2'-O-methyl-uridine
  modified_base 18: mod_base = OTHER; note = 2'-O-methyl-uridine
  modified_base 19: mod_base = OTHER; note = 2'-O-methyl-cytidine
  modified_base 20: mod_base = OTHER; note = 2'-O-methyl-cytidine with phosphorothioate linkage
  modified_base 21: mod_base = OTHER; note = 2'-O-methyl-uridine with phosphorothioate linkage
  modified_base 22: mod_base = OTHER; note = 2'-O-methyl-uridine
taaagtcaatccaaaattcctt

SEQ ID NO: 444 - RNA, 22 nt, synthetic construct
  source 1..22: mol_type = other RNA
  modified_base 1: mod_base = OTHER; note = 2'-O-methyl-uridine with phosphorothioate linkage
  modified_base 2: mod_base = OTHER; note = 2'-fluoro-adenosine with phosphorothioate linkage
  modified_base 3: mod_base = OTHER; note = 2'-fluoro-guanosine
  modified_base 4: mod_base = OTHER; note = 2'-O-methyl-uridine
  modified_base 5: mod_base = OTHER; note = 2'-fluoro-adenosine
  modified_base 6: mod_base = OTHER; note = 2'-O-methyl-cytidine
  modified_base 7: mod_base = OTHER; note = 2'-fluoro-uridine
  modified_base 8: mod_base = OTHER; note = 2'-O-methyl-uridine
  modified_base 9: mod_base = OTHER; note = 2'-O-methyl-uridine
  modified_base 10: mod_base = OTHER; note = 2'-fluoro-guanosine
  modified_base 11: mod_base = OTHER; note = 2'-O-methyl-adenosine
  modified_base 12: mod_base = OTHER; note = 2'-O-methyl-adenosine
  modified_base 13: mod_base = OTHER; note = 2'-O-methyl-adenosine
  modified_base 14: mod_base = OTHER; note = 2'-fluoro-guanosine
  modified_base 15: mod_base = OTHER; note = 2'-O-methyl-uridine
  modified_base 16: mod_base = OTHER; note = 2'-fluoro-cytidine
  modified_base 17: mod_base = OTHER; note = 2'-O-methyl-adenosine
  modified_base 18: mod_base = OTHER; note = 2'-O-methyl-adenosine
  modified_base 19: mod_base = OTHER; note = 2'-O-methyl-uridine
  modified_base 20: mod_base = OTHER; note = 2'-O-methyl-cytidine with phosphorothioate linkage
  modified_base 21: mod_base = OTHER; note = 2'-O-methyl-cytidine with phosphorothioate linkage
  modified_base 22: mod_base = OTHER; note = 2'-O-methyl-adenosine
tagtactttgaaagtcaatcca

SEQ ID NO: 445 - RNA, 22 nt, synthetic construct
  source 1..22: mol_type = other RNA
  modified_base 1: mod_base = OTHER; note = 2'-O-methyl-uridine with phosphorothioate linkage
  modified_base 2: mod_base = OTHER; note = 2'-fluoro-adenosine with phosphorothioate linkage
  modified_base 3: mod_base = OTHER; note = 2'-fluoro-guanosine
  modified_base 4: mod_base = OTHER; note = 2'-O-methyl-guanosine
  modified_base 5: mod_base = OTHER; note = 2'-fluoro-uridine
  modified_base 6: mod_base = OTHER; note = 2'-O-methyl-adenosine
  modified_base 7: mod_base = OTHER; note = 2'-fluoro-uridine
  modified_base 8: mod_base = OTHER; note = 2'-O-methyl-adenosine
  modified_base 9: mod_base = OTHER; note = 2'-O-methyl-adenosine
  modified_base 10: mod_base = OTHER; note = 2'-fluoro-guanosine
  modified_base 11: mod_base = OTHER; note = 2'-O-methyl-adenosine
  modified_base 12: mod_base = OTHER; note = 2'-O-methyl-adenosine
  modified_base 13: mod_base = OTHER; note = 2'-O-methyl-guanosine
  modified_base 14: mod_base = OTHER; note = 2'-fluoro-adenosine
  modified_base 15: mod_base = OTHER; note = 2'-O-methyl-guanosine
  modified_base 16: mod_base = OTHER; note = 2'-fluoro-uridine
  modified_base 17: mod_base = OTHER; note = 2'-O-methyl-cytidine
  modified_base 18: mod_base = OTHER; note = 2'-O-methyl-adenosine
  modified_base 19: mod_base = OTHER; note = 2'-O-methyl-cytidine
  modified_base 20: mod_base = OTHER; note = 2'-O-methyl-guanosine with phosphorothioate linkage
  modified_base 21: mod_base = OTHER; note = 2'-O-methyl-cytidine with phosphorothioate linkage
  modified_base 22: mod_base = OTHER; note = 2'-O-methyl-uridine
taggtataagaagagtcacgct

SEQ ID NO: 446 - RNA, 22 nt, synthetic construct
  source 1..22: mol_type = other RNA
  modified_base 1: mod_base = OTHER; note = 2'-O-methyl-uridine with phosphorothioate linkage
  modified_base 2: mod_base = OTHER; note = 2'-fluoro-uridine with phosphorothioate linkage
  modified_base 3: mod_base = OTHER; note = 2'-fluoro-adenosine
  modified_base 4: mod_base = OTHER; note = 2'-O-methyl-guanosine
  modified_base 5: mod_base = OTHER; note = 2'-fluoro-guanosine
  modified_base 6: mod_base = OTHER; note = 2'-O-methyl-uridine
  modified_base 7: mod_base = OTHER; note = 2'-fluoro-adenosine
  modified_base 8: mod_base = OTHER; note = 2'-O-methyl-uridine
  modified_base 9: mod_base = OTHER; note = 2'-O-methyl-adenosine
  modified_base 10: mod_base = OTHER; note = 2'-fluoro-adenosine
  modified_base 11: mod_base = OTHER; note = 2'-O-methyl-guanosine
  modified_base 12: mod_base = OTHER; note = 2'-O-methyl-adenosine
  modified_base 13: mod_base = OTHER; note = 2'-O-methyl-adenosine
  modified_base 14: mod_base = OTHER; note = 2'-fluoro-guanosine
  modified_base 15: mod_base = OTHER; note = 2'-O-methyl-adenosine
  modified_base 16: mod_base = OTHER; note = 2'-fluoro-guanosine
  modified_base 17: mod_base = OTHER; note = 2'-O-methyl-uridine
  modified_base 18: mod_base = OTHER; note = 2'-O-methyl-cytidine
  modified_base 19: mod_base = OTHER; note = 2'-O-methyl-adenosine
  modified_base 20: mod_base = OTHER; note = 2'-O-methyl-cytidine with phosphorothioate linkage
  modified_base 21: mod_base = OTHER; note = 2'-O-methyl-guanosine with phosphorothioate linkage
  modified_base 22: mod_base = OTHER; note = 2'-O-methyl-cytidine
ttaggtataagaagagtcacgc

SEQ ID NO: 447 - RNA, 22 nt, synthetic construct
  source 1..22: mol_type = other RNA
  modified_base 1: mod_base = OTHER; note = 2'-O-methyl-uridine with phosphorothioate linkage
  modified_base 2: mod_base = OTHER; note = 2'-fluoro-adenosine with phosphorothioate linkage
  modified_base 3: mod_base = OTHER; note = 2'-fluoro-guanosine
  modified_base 4: mod_base = OTHER; note = 2'-O-methyl-uridine
  modified_base 5: mod_base = OTHER; note = 2'-fluoro-uridine
  modified_base 6: mod_base = OTHER; note = 2'-O-methyl-cytidine
  modified_base 7: mod_base = OTHER; note = 2'-fluoro-adenosine
  modified_base 8: mod_base = OTHER; note = 2'-O-methyl-adenosine
  modified_base 9: mod_base = OTHER; note = 2'-O-methyl-guanosine
  modified_base 10: mod_base = OTHER; note = 2'-fluoro-guanosine
  modified_base 11: mod_base = OTHER; note = 2'-O-methyl-cytidine
  modified_base 12: mod_base = OTHER; note = 2'-O-methyl-adenosine
  modified_base 13: mod_base = OTHER; note = 2'-O-methyl-uridine
  modified_base 14: mod_base = OTHER; note = 2'-fluoro-guanosine
  modified_base 15: mod_base = OTHER; note = 2'-O-methyl-uridine
  modified_base 16: mod_base = OTHER; note = 2'-fluoro-uridine
  modified_base 17: mod_base = OTHER; note = 2'-O-methyl-uridine
  modified_base 18: mod_base = OTHER; note = 2'-O-methyl-uridine
  modified_base 19: mod_base = OTHER; note = 2'-O-methyl-guanosine
  modified_base 20: mod_base = OTHER; note = 2'-O-methyl-cytidine with phosphorothioate linkage
  modified_base 21: mod_base = OTHER; note = 2'-O-methyl-adenosine with phosphorothioate linkage
  modified_base 22: mod_base = OTHER; note = 2'-O-methyl-adenosine
tagttcaaggcatgttttgcaa

SEQ ID NO: 448 - RNA, 22 nt, synthetic construct
  source 1..22: mol_type = other RNA
  modified_base 1: mod_base = OTHER; note = 2'-O-methyl-uridine with phosphorothioate linkage
  modified_base 2: mod_base = OTHER; note = 2'-fluoro-uridine with phosphorothioate linkage
  modified_base 3: mod_base = OTHER; note = 2'-fluoro-uridine
  modified_base 4: mod_base = OTHER; note = 2'-O-methyl-uridine
  modified_base 5: mod_base = OTHER; note = 2'-fluoro-cytidine
  modified_base 6: mod_base = OTHER; note = 2'-O-methyl-adenosine
  modified_base 7: mod_base = OTHER; note = 2'-fluoro-cytidine
  modified_base 8: mod_base = OTHER; note = 2'-O-methyl-adenosine
  modified_base 9: mod_base = OTHER; note = 2'-O-methyl-guanosine
  modified_base 10: mod_base = OTHER; note = 2'-fluoro-uridine
  modified_base 11: mod_base = OTHER; note = 2'-O-methyl-adenosine
  modified_base 12: mod_base = OTHER; note = 2'-O-methyl-guanosine
  modified_base 13: mod_base = OTHER; note = 2'-O-methyl-uridine
  modified_base 14: mod_base = OTHER; note = 2'-fluoro-uridine
  modified_base 15: mod_base = OTHER; note = 2'-O-methyl-cytidine
  modified_base 16: mod_base = OTHER; note = 2'-fluoro-adenosine
  modified_base 17: mod_base = OTHER; note = 2'-O-methyl-adenosine
  modified_base 18: mod_base = OTHER; note = 2'-O-methyl-guanosine
  modified_base 19: mod_base = OTHER; note = 2'-O-methyl-adenosine
  modified_base 20: mod_base = OTHER; note = 2'-O-methyl-guanosine with phosphorothioate linkage
  modified_base 21: mod_base = OTHER; note = 2'-O-methyl-uridine with phosphorothioate linkage
  modified_base 22: mod_base = OTHER; note = 2'-O-methyl-uridine
ttttcacagtagttcaagagtt

SEQ ID NO: 449 - RNA, 22 nt, synthetic construct
  source 1..22: mol_type = other RNA
  modified_base 1: mod_base = OTHER; note = 2'-O-methyl-uridine with phosphorothioate linkage
  modified_base 2: mod_base = OTHER; note = 2'-fluoro-adenosine with phosphorothioate linkage
  modified_base 3: mod_base = OTHER; note = 2'-fluoro-uridine
  modified_base 4: mod_base = OTHER; note = 2'-O-methyl-uridine
  modified_base 5: mod_base = OTHER; note = 2'-fluoro-cytidine
  modified_base 6: mod_base = OTHER; note = 2'-O-methyl-uridine
  modified_base 7: mod_base = OTHER; note = 2'-fluoro-uridine
  modified_base 8: mod_base = OTHER; note = 2'-O-methyl-uridine
  modified_base 9: mod_base = OTHER; note = 2'-O-methyl-uridine
  modified_base 10: mod_base = OTHER; note = 2'-fluoro-cytidine
  modified_base 11: mod_base = OTHER; note = 2'-O-methyl-adenosine
  modified_base 12: mod_base = OTHER; note = 2'-O-methyl-cytidine
  modified_base 13: mod_base = OTHER; note = 2'-O-methyl-adenosine
  modified_base 14: mod_base = OTHER; note = 2'-fluoro-guanosine
  modified_base 15: mod_base = OTHER; note = 2'-O-methyl-uridine
  modified_base 16: mod_base = OTHER; note = 2'-fluoro-adenosine
  modified_base 17: mod_base = OTHER; note = 2'-O-methyl-guanosine
  modified_base 18: mod_base = OTHER; note = 2'-O-methyl-uridine
  modified_base 19: mod_base = OTHER; note = 2'-O-methyl-uridine
  modified_base 20: mod_base = OTHER; note = 2'-O-methyl-cytidine with phosphorothioate linkage
  modified_base 21: mod_base = OTHER; note = 2'-O-methyl-adenosine with phosphorothioate linkage
  modified_base 22: mod_base = OTHER; note = 2'-O-methyl-adenosine
tattcttttcacagtagttcaa

SEQ ID NO: 450 - RNA, 22 nt, synthetic construct
  source 1..22: mol_type = other RNA
  modified_base 1: mod_base = OTHER; note = 2'-O-methyl-uridine with phosphorothioate linkage
  modified_base 2: mod_base = OTHER; note = 2'-fluoro-uridine with phosphorothioate linkage
  modified_base 3: mod_base = OTHER; note = 2'-fluoro-adenosine
  modified_base 4: mod_base = OTHER; note = 2'-O-methyl-cytidine
  modified_base 5: mod_base = OTHER; note = 2'-fluoro-adenosine
  modified_base 6: mod_base = OTHER; note = 2'-O-methyl-adenosine
  modified_base 7: mod_base = OTHER; note = 2'-fluoro-cytidine
  modified_base 8: mod_base = OTHER; note = 2'-O-methyl-guanosine
  modified_base 9: mod_base = OTHER; note = 2'-O-methyl-guanosine
  modified_base 10: mod_base = OTHER; note = 2'-fluoro-uridine
  modified_base 11: mod_base = OTHER; note = 2'-O-methyl-guanosine
  modified_base 12: mod_base = OTHER; note = 2'-O-methyl-adenosine
  modified_base 13: mod_base = OTHER; note = 2'-O-methyl-uridine
  modified_base 14: mod_base = OTHER; note = 2'-fluoro-uridine
  modified_base 15: mod_base = OTHER; note = 2'-O-methyl-cytidine
  modified_base 16: mod_base = OTHER; note = 2'-fluoro-uridine
  modified_base 17: mod_base = OTHER; note = 2'-O-methyl-uridine
  modified_base 18: mod_base = OTHER; note = 2'-O-methyl-uridine
  modified_base 19: mod_base = OTHER; note = 2'-O-methyl-uridine
  modified_base 20: mod_base = OTHER; note = 2'-O-methyl-cytidine with phosphorothioate linkage
  modified_base 21: mod_base = OTHER; note = 2'-O-methyl-adenosine with phosphorothioate linkage
  modified_base 22: mod_base = OTHER; note = 2'-O-methyl-cytidine
ttacaacggtgattcttttcac

SEQ ID NO: 451 - RNA, 22 nt, synthetic construct
  source 1..22: mol_type = other RNA
  modified_base 1: mod_base = OTHER; note = 2'-O-methyl-uridine with phosphorothioate linkage
  modified_base 2: mod_base = OTHER; note = 2'-fluoro-adenosine with phosphorothioate linkage
  modified_base 3: mod_base = OTHER; note = 2'-fluoro-adenosine
  modified_base 4: mod_base = OTHER; note = 2'-O-methyl-adenosine
  modified_base 5: mod_base = OTHER; note = 2'-fluoro-adenosine
  modified_base 6: mod_base = OTHER; note = 2'-O-methyl-guanosine
  modified_base 7: mod_base = OTHER; note = 2'-fluoro-uridine
  modified_base 8: mod_base = OTHER; note = 2'-O-methyl-cytidine
  modified_base 9: mod_base = OTHER; note = 2'-O-methyl-uridine
  modified_base 10: mod_base = OTHER; note = 2'-fluoro-uridine
  modified_base 11: mod_base = OTHER; note = 2'-O-methyl-uridine
  modified_base 12: mod_base = OTHER; note = 2'-O-methyl-adenosine
  modified_base 13: mod_base = OTHER; note = 2'-O-methyl-cytidine
  modified_base 14: mod_base = OTHER; note = 2'-fluoro-adenosine
  modified_base 15: mod_base = OTHER; note = 2'-O-methyl-adenosine
  modified_base 16: mod_base = OTHER; note = 2'-fluoro-cytidine
  modified_base 17: mod_base = OTHER; note = 2'-O-methyl-guanosine
  modified_base 18: mod_base = OTHER; note = 2'-O-methyl-guanosine
  modified_base 19: mod_base = OTHER; note = 2'-O-methyl-uridine
  modified_base 20: mod_base = OTHER; note = 2'-O-methyl-guanosine with phosphorothioate linkage
  modified_base 21: mod_base = OTHER; note = 2'-O-methyl-adenosine with phosphorothioate linkage
  modified_base 22: mod_base = OTHER; note = 2'-O-methyl-uridine
taaaagtctttacaacggtgat

SEQ ID NO: 452 - RNA, 22 nt, synthetic construct
  source 1..22: mol_type = other RNA
  modified_base 1: mod_base = OTHER; note = 2'-O-methyl-uridine with phosphorothioate linkage
  modified_base 2: mod_base = OTHER; note = 2'-fluoro-adenosine with phosphorothioate linkage
  modified_base 3: mod_base = OTHER; note = 2'-fluoro-guanosine
  modified_base 4: mod_base = OTHER; note = 2'-O-methyl-adenosine
  modified_base 5: mod_base = OTHER; note = 2'-fluoro-guanosine
  modified_base 6: mod_base = OTHER; note = 2'-O-methyl-uridine
  modified_base 7: mod_base = OTHER; note = 2'-fluoro-adenosine
  modified_base 8: mod_base = OTHER; note = 2'-O-methyl-uridine
  modified_base 9: mod_base = OTHER; note = 2'-O-methyl-cytidine
  modified_base 10: mod_base = OTHER; note = 2'-fluoro-adenosine
  modified_base 11: mod_base = OTHER; note = 2'-O-methyl-guanosine
  modified_base 12: mod_base = OTHER; note = 2'-O-methyl-cytidine
  modified_base 13: mod_base = OTHER; note = 2'-O-methyl-uridine
  modified_base 14: mod_base = OTHER; note = 2'-fluoro-adenosine
  modified_base 15: mod_base = OTHER; note = 2'-O-methyl-guanosine
  modified_base 16: mod_base = OTHER; note = 2'-fluoro-cytidine
  modified_base 17: mod_base = OTHER; note = 2'-O-methyl-uridine
  modified_base 18: mod_base = OTHER; note = 2'-O-methyl-uridine
  modified_base 19: mod_base = OTHER; note = 2'-O-methyl-adenosine
  modified_base 20: mod_base = OTHER; note = 2'-O-methyl-cytidine with phosphorothioate linkage
  modified_base 21: mod_base = OTHER; note = 2'-O-methyl-adenosine with phosphorothioate linkage
  modified_base 22: mod_base = OTHER; note = 2'-O-methyl-adenosine
tagagtatcagctagcttacaa

SEQ ID NO: 453 - RNA, 22 nt, synthetic construct
  source 1..22: mol_type = other RNA
  modified_base 1: mod_base = OTHER; note = 2'-O-methyl-uridine with phosphorothioate linkage
  modified_base 2: mod_base = OTHER; note = 2'-fluoro-adenosine with phosphorothioate linkage
  modified_base 3: mod_base = OTHER; note = 2'-fluoro-uridine
  modified_base 4: mod_base = OTHER; note = 2'-O-methyl-uridine
  modified_base 5: mod_base = OTHER; note = 2'-fluoro-cytidine
  modified_base 6: mod_base = OTHER; note = 2'-O-methyl-cytidine
  modified_base 7: mod_base = OTHER; note = 2'-fluoro-uridine
  modified_base 8: mod_base = OTHER; note = 2'-O-methyl-uridine
  modified_base 9: mod_base = OTHER; note = 2'-O-methyl-uridine
  modified_base 10: mod_base = OTHER; note = 2'-fluoro-guanosine
  modified_base 11: mod_base = OTHER; note = 2'-O-methyl-guanosine
  modified_base 12: mod_base = OTHER; note = 2'-O-methyl-guanosine
  modified_base 13: mod_base = OTHER; note = 2'-O-methyl-cytidine
  modified_base 14: mod_base = OTHER; note = 2'-fluoro-cytidine
  modified_base 15: mod_base = OTHER; note = 2'-O-methyl-uridine
  modified_base 16: mod_base = OTHER; note = 2'-fluoro-guanosine
  modified_base 17: mod_base = OTHER; note = 2'-O-methyl-uridine
  modified_base 18: mod_base = OTHER; note = 2'-O-methyl-cytidine
  modified_base 19: mod_base = OTHER; note = 2'-O-methyl-guanosine
  modified_base 20: mod_base = OTHER; note = 2'-O-methyl-guanosine with phosphorothioate linkage
  modified_base 21: mod_base = OTHER; note = 2'-O-methyl-cytidine with phosphorothioate linkage
  modified_base 22: mod_base = OTHER; note = 2'-O-methyl-uridine
tattcctttgggcctgtcggct

SEQ ID NO: 454 - RNA, 22 nt, synthetic construct
  source 1..22: mol_type = other RNA
  modified_base 1: mod_base = OTHER; note = 2'-O-methyl-uridine with phosphorothioate linkage
  modified_base 2: mod_base = OTHER; note = 2'-fluoro-adenosine with phosphorothioate linkage
  modified_base 3: mod_base = OTHER; note = 2'-fluoro-cytidine
  modified_base 4: mod_base = OTHER; note = 2'-O-methyl-adenosine
  modified_base 5: mod_base = OTHER; note = 2'-fluoro-guanosine
  modified_base 6: mod_base = OTHER; note = 2'-O-methyl-uridine
  modified_base 7: mod_base = OTHER; note = 2'-fluoro-uridine
  modified_base 8: mod_base = OTHER; note = 2'-O-methyl-uridine
  modified_base 9: mod_base = OTHER; note = 2'-O-methyl-adenosine
  modified_base 10: mod_base = OTHER; note = 2'-fluoro-uridine
  modified_base 11: mod_base = OTHER; note = 2'-O-methyl-uridine
  modified_base 12: mod_base = OTHER; note = 2'-O-methyl-guanosine
  modified_base 13: mod_base = OTHER; note = 2'-O-methyl-cytidine
  modified_base 14: mod_base = OTHER; note = 2'-fluoro-cytidine
  modified_base 15: mod_base = OTHER; note = 2'-O-methyl-cytidine
  modified_base 16: mod_base = OTHER; note = 2'-fluoro-adenosine
  modified_base 17: mod_base = OTHER; note = 2'-O-methyl-adenosine
  modified_base 18: mod_base = OTHER; note = 2'-O-methyl-uridine
  modified_base 19: mod_base = OTHER; note = 2'-O-methyl-uridine
  modified_base 20: mod_base = OTHER; note = 2'-O-methyl-cytidine with phosphorothioate linkage
  modified_base 21: mod_base = OTHER; note = 2'-O-methyl-cytidine with phosphorothioate linkage
  modified_base 22: mod_base = OTHER; note = 2'-O-methyl-uridine
tacagtttattgcccaattcct

SEQ ID NO: 455 - RNA, 22 nt, synthetic construct
  source 1..22: mol_type = other RNA
  modified_base 1: mod_base = OTHER; note = 2'-O-methyl-uridine with phosphorothioate linkage
  modified_base 2: mod_base = OTHER; note = 2'-fluoro-adenosine with phosphorothioate linkage
  modified_base 3: mod_base = OTHER; note = 2'-fluoro-cytidine
  modified_base 4: mod_base = OTHER; note = 2'-O-methyl-uridine
  modified_base 5: mod_base = OTHER; note = 2'-fluoro-adenosine
  modified_base 6: mod_base = OTHER; note = 2'-O-methyl-cytidine
  modified_base 7: mod_base = OTHER; note = 2'-fluoro-uridine
  modified_base 8: mod_base = OTHER; note = 2'-O-methyl-adenosine
  modified_base 9: mod_base = OTHER; note = 2'-O-methyl-adenosine
  modified_base 10: mod_base = OTHER; note = 2'-fluoro-adenosine
  modified_base 11: mod_base = OTHER; note = 2'-O-methyl-adenosine
  modified_base 12: mod_base = OTHER; note = 2'-O-methyl-uridine
  modified_base 13: mod_base = OTHER; note = 2'-O-methyl-cytidine
  modified_base 14: mod_base = OTHER; note = 2'-fluoro-cytidine
  modified_base 15: mod_base = OTHER; note = 2'-O-methyl-adenosine
  modified_base 16: mod_base = OTHER; note = 2'-fluoro-uridine
  modified_base 17: mod_base = OTHER; note = 2'-O-methyl-cytidine
  modified_base 18: mod_base = OTHER; note = 2'-O-methyl-uridine
  modified_base 19: mod_base = OTHER; note = 2'-O-methyl-adenosine
  modified_base 20: mod_base = OTHER; note = 2'-O-methyl-cytidine with phosphorothioate linkage
  modified_base 21: mod_base = OTHER; note = 2'-O-methyl-adenosine with phosphorothioate linkage
  modified_base 22: mod_base = OTHER; note = 2'-O-methyl-uridine
tactactaaaatccatctacat

SEQ ID NO: 456 - RNA, 22 nt, synthetic construct
  source 1..22: mol_type = other RNA
  modified_base 1: mod_base = OTHER; note = 2'-O-methyl-uridine with phosphorothioate linkage
  modified_base 2: mod_base = OTHER; note = 2'-fluoro-uridine with phosphorothioate linkage
  modified_base 3: mod_base = OTHER; note = 2'-fluoro-uridine
  modified_base 4: mod_base = OTHER; note = 2'-O-methyl-uridine
  modified_base 5: mod_base = OTHER; note = 2'-fluoro-uridine
  modified_base 6: mod_base = OTHER; note = 2'-O-methyl-guanosine
  modified_base 7: mod_base = OTHER; note = 2'-fluoro-guanosine
  modified_base 8: mod_base = OTHER; note = 2'-O-methyl-uridine
  modified_base 9: mod_base = OTHER; note = 2'-O-methyl-adenosine
  modified_base 10: mod_base = OTHER; note = 2'-fluoro-uridine
  modified_base 11: mod_base = OTHER; note = 2'-O-methyl-adenosine
  modified_base 12: mod_base = OTHER; note = 2'-O-methyl-adenosine
  modified_base 13: mod_base = OTHER; note = 2'-O-methyl-adenosine
  modified_base 14: mod_base = OTHER; note = 2'-fluoro-guanosine
  modified_base 15: mod_base = OTHER; note = 2'-O-methyl-guanosine
  modified_base 16: mod_base = OTHER; note = 2'-fluoro-cytidine
  modified_base 17: mod_base = OTHER; note = 2'-O-methyl-uridine
  modified_base 18: mod_base = OTHER; note = 2'-O-methyl-adenosine
  modified_base 19: mod_base = OTHER; note = 2'-O-methyl-uridine
  modified_base 20: mod_base = OTHER; note = 2'-O-methyl-cytidine with phosphorothioate linkage
  modified_base 21: mod_base = OTHER; note = 2'-O-methyl-adenosine with phosphorothioate linkage
  modified_base 22: mod_base = OTHER; note = 2'-O-methyl-cytidine
tttttggtataaaggctatcac

SEQ ID NO: 457 - RNA, 22 nt, synthetic construct
  source 1..22: mol_type = other RNA
  modified_base 1: mod_base = OTHER; note = 2'-O-methyl-uridine with phosphorothioate linkage
  modified_base 2: mod_base = OTHER; note = 2'-fluoro-adenosine with phosphorothioate linkage
  modified_base 3: mod_base = OTHER; note = 2'-fluoro-adenosine
  modified_base 4: mod_base = OTHER; note = 2'-O-methyl-cytidine
  modified_base 5: mod_base = OTHER; note = 2'-fluoro-adenosine
  modified_base 6: mod_base = OTHER; note = 2'-O-methyl-uridine
  modified_base 7: mod_base = OTHER; note = 2'-fluoro-uridine
  modified_base 8: mod_base = OTHER; note = 2'-O-methyl-uridine
  modified_base 9: mod_base = OTHER; note = 2'-O-methyl-uridine
  modified_base 10: mod_base = OTHER; note = 2'-fluoro-guanosine
  modified_base 11: mod_base = OTHER; note = 2'-O-methyl-guanosine
  modified_base 12: mod_base = OTHER; note = 2'-O-methyl-uridine
  modified_base 13: mod_base = OTHER; note = 2'-O-methyl-adenosine
  modified_base 14: mod_base = OTHER; note = 2'-fluoro-uridine
  modified_base 15: mod_base = OTHER; note = 2'-O-methyl-adenosine
  modified_base 16: mod_base = OTHER; note = 2'-fluoro-adenosine
  modified_base 17: mod_base = OTHER; note = 2'-O-methyl-adenosine
  modified_base 18: mod_base = OTHER; note = 2'-O-methyl-guanosine
  modified_base 19: mod_base = OTHER; note = 2'-O-methyl-guanosine
  modified_base 20: mod_base = OTHER; note = 2'-O-methyl-cytidine with phosphorothioate linkage
  modified_base 21: mod_base = OTHER; note = 2'-O-methyl-uridine with phosphorothioate linkage
  modified_base 22: mod_base = OTHER; note = 2'-O-methyl-adenosine
taacattttggtataaaggcta

SEQ ID NO: 458 - RNA, 22 nt, synthetic construct
  source 1..22: mol_type = other RNA
  modified_base 1: mod_base = OTHER; note = 2'-O-methyl-uridine with phosphorothioate linkage
  modified_base 2: mod_base = OTHER; note = 2'-fluoro-uridine with phosphorothioate linkage
  modified_base 3: mod_base = OTHER; note = 2'-fluoro-adenosine
  modified_base 4: mod_base = OTHER; note = 2'-O-methyl-uridine
  modified_base 5: mod_base = OTHER; note = 2'-fluoro-uridine
  modified_base 6: mod_base = OTHER; note = 2'-O-methyl-uridine
  modified_base 7: mod_base = OTHER; note = 2'-fluoro-adenosine
  modified_base 8: mod_base = OTHER; note = 2'-O-methyl-cytidine
  modified_base 9: mod_base = OTHER; note = 2'-O-methyl-adenosine
  modified_base 10: mod_base = OTHER; note = 2'-fluoro-uridine
  modified_base 11: mod_base = OTHER; note = 2'-O-methyl-cytidine
  modified_base 12: mod_base = OTHER; note = 2'-O-methyl-uridine
  modified_base 13: mod_base = OTHER; note = 2'-O-methyl-guanosine
  modified_base 14: mod_base = OTHER; note = 2'-fluoro-adenosine
  modified_base 15: mod_base = OTHER; note = 2'-O-methyl-adenosine
  modified_base 16: mod_base = OTHER; note = 2'-fluoro-guanosine
  modified_base 17: mod_base = OTHER; note = 2'-O-methyl-adenosine
  modified_base 18: mod_base = OTHER; note = 2'-O-methyl-cytidine
  modified_base 19: mod_base = OTHER; note = 2'-O-methyl-adenosine
  modified_base 20: mod_base = OTHER; note = 2'-O-methyl-guanosine with phosphorothioate linkage
  modified_base 21: mod_base = OTHER; note = 2'-O-methyl-adenosine with phosphorothioate linkage
  modified_base 22: mod_base = OTHER; note = 2'-O-methyl-uridine
ttatttacatctgaagacagat

SEQ ID NO: 459 - RNA, 22 nt, synthetic construct
  source 1..22: mol_type = other RNA
  modified_base 1: mod_base = OTHER; note = 2'-O-methyl-uridine with phosphorothioate linkage
  modified_base 2: mod_base = OTHER; note = 2'-fluoro-cytidine with phosphorothioate linkage
  modified_base 3: mod_base = OTHER; note = 2'-fluoro-adenosine
  modified_base 4: mod_base = OTHER; note = 2'-O-methyl-adenosine
  modified_base 5: mod_base = OTHER; note = 2'-fluoro-adenosine
  modified_base 6: mod_base = OTHER; note = 2'-O-methyl-adenosine
  modified_base 7: mod_base = OTHER; note = 2'-fluoro-guanosine
  modified_base 8: mod_base = OTHER; note = 2'-O-methyl-adenosine
  modified_base 9: mod_base = OTHER; note = 2'-O-methyl-cytidine
  modified_base 10: mod_base = OTHER; note = 2'-fluoro-adenosine
  modified_base 11: mod_base = OTHER; note = 2'-O-methyl-uridine
  modified_base 12: mod_base = OTHER; note = 2'-O-methyl-adenosine
  modified_base 13: mod_base = OTHER; note = 2'-O-methyl-cytidine
  modified_base 14: mod_base = OTHER; note = 2'-fluoro-adenosine
  modified_base 15: mod_base = OTHER; note = 2'-O-methyl-cytidine
  modified_base 16: mod_base = OTHER; note = 2'-fluoro-adenosine
  modified_base 17: mod_base = OTHER; note = 2'-O-methyl-cytidine
  modified_base 18: mod_base = OTHER; note = 2'-O-methyl-uridine
  modified_base 19: mod_base = OTHER; note = 2'-O-methyl-uridine
  modified_base 20: mod_base = OTHER; note = 2'-O-methyl-cytidine with phosphorothioate linkage
  modified_base 21: mod_base = OTHER; note = 2'-O-methyl-adenosine with phosphorothioate linkage
  modified_base 22: mod_base = OTHER; note = 2'-O-methyl-guanosine
tcaaaagacatacacacttcag

SEQ ID NO: 460 - RNA, 22 nt, synthetic construct
  source 1..22: mol_type = other RNA
  modified_base 1: mod_base = OTHER; note = 2'-O-methyl-uridine with phosphorothioate linkage
  modified_base 2: mod_base = OTHER; note = 2'-fluoro-adenosine with phosphorothioate linkage
  modified_base 3: mod_base = OTHER; note = 2'-fluoro-cytidine
  modified_base 4: mod_base = OTHER; note = 2'-O-methyl-adenosine
  modified_base 5: mod_base = OTHER; note = 2'-fluoro-adenosine
  modified_base 6: mod_base = OTHER; note = 2'-O-methyl-adenosine
  modified_base 7: mod_base = OTHER; note = 2'-fluoro-adenosine
  modified_base 8: mod_base = OTHER; note = 2'-O-methyl-guanosine
  modified_base 9: mod_base = OTHER; note = 2'-O-methyl-adenosine
  modified_base 10: mod_base = OTHER; note = 2'-fluoro-cytidine
  modified_base 11: mod_base = OTHER; note = 2'-O-methyl-adenosine
  modified_base 12: mod_base = OTHER; note = 2'-O-methyl-uridine
  modified_base 13: mod_base = OTHER; note = 2'-O-methyl-adenosine
  modified_base 14: mod_base = OTHER; note = 2'-fluoro-cytidine
  modified_base 15: mod_base = OTHER; note = 2'-O-methyl-adenosine
  modified_base 16: mod_base = OTHER; note = 2'-fluoro-cytidine
  modified_base 17: mod_base = OTHER; note = 2'-O-methyl-adenosine
  modified_base 18: mod_base = OTHER; note = 2'-O-methyl-cytidine
  modified_base 19: mod_base = OTHER; note = 2'-O-methyl-uridine
  modified_base 20: mod_base = OTHER; note = 2'-O-methyl-uridine with phosphorothioate linkage
  modified_base 21: mod_base = OTHER; note = 2'-O-methyl-cytidine with phosphorothioate linkage
  modified_base 22: mod_base = OTHER; note = 2'-O-methyl-adenosine
tacaaaagacatacacacttca

SEQ ID NO: 461 - RNA, 22 nt, synthetic construct
  source 1..22: mol_type = other RNA
  modified_base 1: mod_base = OTHER; note = 2'-O-methyl-uridine with phosphorothioate linkage
  modified_base 2: mod_base = OTHER; note = 2'-fluoro-cytidine with phosphorothioate linkage
  modified_base 3: mod_base = OTHER; note = 2'-fluoro-adenosine
  modified_base 4: mod_base = OTHER; note = 2'-O-methyl-cytidine
  modified_base 5: mod_base = OTHER; note = 2'-fluoro-adenosine
  modified_base 6: mod_base = OTHER; note = 2'-O-methyl-adenosine
  modified_base 7: mod_base = OTHER; note = 2'-fluoro-adenosine
  modified_base 8: mod_base = OTHER; note = 2'-O-methyl-adenosine
  modified_base 9: mod_base = OTHER; note = 2'-O-methyl-guanosine
  modified_base 10: mod_base = OTHER; note = 2'-fluoro-adenosine
  modified_base 11: mod_base = OTHER; note = 2'-O-methyl-cytidine
  modified_base 12: mod_base = OTHER; note = 2'-O-methyl-adenosine
  modified_base 13: mod_base = OTHER; note = 2'-O-methyl-uridine
  modified_base 14: mod_base = OTHER; note = 2'-fluoro-adenosine
  modified_base 15: mod_base = OTHER; note = 2'-O-methyl-cytidine
  modified_base 16: mod_base = OTHER; note = 2'-fluoro-adenosine
  modified_base 17: mod_base = OTHER; note = 2'-O-methyl-cytidine
  modified_base 18: mod_base = OTHER; note = 2'-O-methyl-adenosine
  modified_base 19: mod_base = OTHER; note = 2'-O-methyl-cytidine
  modified_base 20: mod_base = OTHER; note = 2'-O-methyl-uridine with phosphorothioate linkage
  modified_base 21: mod_base = OTHER; note = 2'-O-methyl-uridine with phosphorothioate linkage
  modified_base 22: mod_base = OTHER; note = 2'-O-methyl-cytidine
tcacaaaagacatacacacttc

SEQ ID NO: 462 - RNA, 22 nt, synthetic construct
  source 1..22: mol_type = other RNA
  modified_base 1: mod_base = OTHER; note = 2'-O-methyl-uridine with phosphorothioate linkage
  modified_base 2: mod_base = OTHER; note = 2'-fluoro-uridine with phosphorothioate linkage
  modified_base 3: mod_base = OTHER; note = 2'-fluoro-cytidine
  modified_base 4: mod_base = OTHER; note = 2'-O-methyl-adenosine
  modified_base 5: mod_base = OTHER; note = 2'-fluoro-cytidine
  modified_base 6: mod_base = OTHER; note = 2'-O-methyl-adenosine
  modified_base 7: mod_base = OTHER; note = 2'-fluoro-cytidine
  modified_base 8: mod_base = OTHER; note = 2'-O-methyl-adenosine
  modified_base 9: mod_base = OTHER; note = 2'-O-methyl-adenosine
  modified_base 10: mod_base = OTHER; note = 2'-fluoro-adenosine
  modified_base 11: mod_base = OTHER; note = 2'-O-methyl-adenosine
  modified_base 12: mod_base = OTHER; note = 2'-O-methyl-guanosine
  modified_base 13: mod_base = OTHER; note = 2'-O-methyl-adenosine
  modified_base 14: mod_base = OTHER; note = 2'-fluoro-cytidine
  modified_base 15: mod_base = OTHER; note = 2'-O-methyl-adenosine
  modified_base 16: mod_base = OTHER; note = 2'-fluoro-uridine
  modified_base 17: mod_base = OTHER; note = 2'-O-methyl-adenosine
  modified_base 18: mod_base = OTHER; note = 2'-O-methyl-cytidine
  modified_base 19: mod_base = OTHER; note = 2'-O-methyl-adenosine
  modified_base 20: mod_base = OTHER; note = 2'-O-methyl-cytidine with phosphorothioate linkage
  modified_base 21: mod_base = OTHER; note = 2'-O-methyl-adenosine with phosphorothioate linkage
  modified_base 22: mod_base = OTHER; note = 2'-O-methyl-cytidine
ttcacacaaaagacatacacac

SEQ ID NO: 463 - RNA, 22 nt, synthetic construct
  source 1..22: mol_type = other RNA
  modified_base 1: mod_base = OTHER; note = 2'-O-methyl-uridine with phosphorothioate linkage
  modified_base 2: mod_base = OTHER; note = 2'-fluoro-adenosine with phosphorothioate linkage
  modified_base 3: mod_base = OTHER; note = 2'-fluoro-uridine
  modified_base 4: mod_base = OTHER; note = 2'-O-methyl-cytidine
  modified_base 5: mod_base = OTHER; note = 2'-fluoro-adenosine
  modified_base 6: mod_base = OTHER; note = 2'-O-methyl-cytidine
  modified_base 7: mod_base = OTHER; note = 2'-fluoro-adenosine
  modified_base 8: mod_base = OTHER; note = 2'-O-methyl-cytidine
  modified_base 9: mod_base = OTHER; note = 2'-O-methyl-adenosine
  modified_base 10: mod_base = OTHER; note = 2'-fluoro-adenosine
  modified_base 11: mod_base = OTHER; note = 2'-O-methyl-adenosine
  modified_base 12: mod_base = OTHER; note = 2'-O-methyl-adenosine
  modified_base 13: mod_base = OTHER; note = 2'-O-methyl-guanosine
  modified_base 14: mod_base = OTHER; note = 2'-fluoro-adenosine
  modified_base 15: mod_base = OTHER; note = 2'-O-methyl-cytidine
  modified_base 16: mod_base = OTHER; note = 2'-fluoro-adenosine
  modified_base 17: mod_base = OTHER; note = 2'-O-methyl-uridine
  modified_base 18: mod_base = OTHER; note = 2'-O-methyl-adenosine
  modified_base 19: mod_base = OTHER; note = 2'-O-methyl-cytidine
  modified_base 20: mod_base = OTHER; note = 2'-O-methyl-adenosine with phosphorothioate linkage
  modified_base 21: mod_base = OTHER; note = 2'-O-methyl-cytidine with phosphorothioate linkage
  modified_base 22: mod_base = OTHER; note = 2'-O-methyl-adenosine
tatcacacaaaagacatacaca

SEQ ID NO: 464 - RNA, 22 nt, synthetic construct
  source 1..22: mol_type = other RNA
  modified_base 1: mod_base = OTHER; note = 2'-O-methyl-uridine with phosphorothioate linkage
  modified_base 2: mod_base = OTHER; note = 2'-fluoro-guanosine with phosphorothioate linkage
  modified_base 3: mod_base = OTHER; note = 2'-fluoro-adenosine
  modified_base 4: mod_base = OTHER; note = 2'-O-methyl-adenosine
  modified_base 5: mod_base = OTHER; note = 2'-fluoro-uridine
  modified_base 6: mod_base = OTHER; note = 2'-O-methyl-cytidine
  modified_base 7: mod_base = OTHER; note = 2'-fluoro-adenosine
  modified_base 8: mod_base = OTHER; note = 2'-O-methyl-cytidine
  modified_base 9: mod_base = OTHER; note = 2'-O-methyl-adenosine
  modified_base 10: mod_base = OTHER; note = 2'-fluoro-cytidine
  modified_base 11: mod_base = OTHER; note = 2'-O-methyl-adenosine
  modified_base 12: mod_base = OTHER; note = 2'-O-methyl-adenosine
  modified_base 13: mod_base = OTHER; note = 2'-O-methyl-adenosine
  modified_base 14: mod_base = OTHER; note = 2'-fluoro-adenosine
  modified_base 15: mod_base = OTHER; note = 2'-O-methyl-guanosine
  modified_base 16: mod_base = OTHER; note = 2'-fluoro-adenosine
  modified_base 17: mod_base = OTHER; note = 2'-O-methyl-cytidine
  modified_base 18: mod_base = OTHER; note = 2'-O-methyl-adenosine
  modified_base 19: mod_base = OTHER; note = 2'-O-methyl-uridine
  modified_base 20: mod_base = OTHER; note = 2'-O-methyl-adenosine with phosphorothioate linkage
  modified_base 21: mod_base = OTHER; note = 2'-O-methyl-cytidine with phosphorothioate linkage
  modified_base 22: mod_base = OTHER; note = 2'-O-methyl-adenosine
tgaatcacacaaaagacataca

SEQ ID NO: 465 - RNA, 22 nt, synthetic construct
  source 1..22: mol_type = other RNA
  modified_base 1: mod_base = OTHER; note = 2'-O-methyl-uridine with phosphorothioate linkage
  modified_base 2: mod_base = OTHER; note = 2'-fluoro-adenosine with phosphorothioate linkage
  modified_base 3: mod_base = OTHER; note = 2'-fluoro-guanosine
  modified_base 4: mod_base = OTHER; note = 2'-O-methyl-adenosine
  modified_base 5: mod_base = OTHER; note = 2'-fluoro-adenosine
  modified_base 6: mod_base = OTHER; note = 2'-O-methyl-uridine
  modified_base 7: mod_base = OTHER; note = 2'-fluoro-cytidine
  modified_base 8: mod_base = OTHER; note = 2'-O-methyl-adenosine
  modified_base 9: mod_base = OTHER; note = 2'-O-methyl-cytidine
  modified_base 10: mod_base = OTHER; note = 2'-fluoro-adenosine
  modified_base 11: mod_base = OTHER; note = 2'-O-methyl-cytidine
  modified_base 12: mod_base = OTHER; note = 2'-O-methyl-adenosine
  modified_base 13: mod_base = OTHER; note = 2'-O-methyl-adenosine
  modified_base 14: mod_base = OTHER; note = 2'-fluoro-adenosine
  modified_base 15: mod_base = OTHER; note = 2'-O-methyl-adenosine
  modified_base 16: mod_base = OTHER; note = 2'-fluoro-guanosine
  modified_base 17: mod_base = OTHER; note = 2'-O-methyl-adenosine
  modified_base 18: mod_base = OTHER; note = 2'-O-methyl-cytidine
  modified_base 19: mod_base = OTHER; note = 2'-O-methyl-adenosine
  modified_base 20: mod_base = OTHER; note = 2'-O-methyl-uridine with phosphorothioate linkage
  modified_base 21: mod_base = OTHER; note = 2'-O-methyl-adenosine with phosphorothioate linkage
  modified_base 22: mod_base = OTHER; note = 2'-O-methyl-cytidine
tagaatcacacaaaagacatac

SEQ ID NO: 466 - RNA, 22 nt, synthetic construct
  source 1..22: mol_type = other RNA
  modified_base 1: mod_base = OTHER; note = 2'-O-methyl-uridine with phosphorothioate linkage
  modified_base 2: mod_base = OTHER; note = 2'-fluoro-adenosine with phosphorothioate linkage
  modified_base 3: mod_base = OTHER; note = 2'-fluoro-adenosine
  modified_base 4: mod_base = OTHER; note = 2'-O-methyl-guanosine
  modified_base 5: mod_base = OTHER; note = 2'-fluoro-adenosine
  modified_base 6: mod_base = OTHER; note = 2'-O-methyl-adenosine
  modified_base 7: mod_base = OTHER; note = 2'-fluoro-uridine
  modified_base 8: mod_base = OTHER; note = 2'-O-methyl-cytidine
  modified_base 9: mod_base = OTHER; note = 2'-O-methyl-adenosine
  modified_base 10: mod_base = OTHER; note = 2'-fluoro-cytidine
  modified_base 11: mod_base = OTHER; note = 2'-O-methyl-adenosine
  modified_base 12: mod_base = OTHER; note = 2'-O-methyl-cytidine
  modified_base 13: mod_base = OTHER; note = 2'-O-methyl-adenosine
  modified_base 14: mod_base = OTHER; note = 2'-fluoro-adenosine
  modified_base 15: mod_base = OTHER; note = 2'-O-methyl-adenosine
  modified_base 16: mod_base = OTHER; note = 2'-fluoro-adenosine
  modified_base 17: mod_base = OTHER; note = 2'-O-methyl-guanosine
  modified_base 18: mod_base = OTHER; note = 2'-O-methyl-adenosine
  modified_base 19: mod_base = OTHER; note = 2'-O-methyl-cytidine
  modified_base 20: mod_base = OTHER; note = 2'-O-methyl-adenosine with phosphorothioate linkage
  modified_base 21: mod_base = OTHER; note = 2'-O-methyl-uridine with phosphorothioate linkage
  modified_base 22: mod_base = OTHER; note = 2'-O-methyl-adenosine
taagaatcacacaaaagacata

SEQ ID NO: 467 - RNA, 22 nt, synthetic construct
  source 1..22: mol_type = other RNA
  modified_base 1: mod_base = OTHER; note = 2'-O-methyl-uridine with phosphorothioate linkage
  modified_base 2: mod_base = OTHER; note = 2'-fluoro-guanosine with phosphorothioate linkage
  modified_base 3: mod_base = OTHER; note = 2'-fluoro-adenosine
  modified_base 4: mod_base = OTHER; note = 2'-O-methyl-adenosine
  modified_base 5: mod_base = OTHER; note = 2'-fluoro-guanosine
  modified_base 6: mod_base = OTHER; note = 2'-O-methyl-adenosine
  modified_base 7: mod_base = OTHER; note = 2'-fluoro-adenosine
  modified_base 8: mod_base = OTHER; note = 2'-O-methyl-uridine
  modified_base 9: mod_base = OTHER; note = 2'-O-methyl-cytidine
  modified_base 10: mod_base = OTHER; note = 2'-fluoro-adenosine
  modified_base 11: mod_base = OTHER; note = 2'-O-methyl-cytidine
  modified_base 12: mod_base = OTHER; note = 2'-O-methyl-adenosine
  modified_base 13: mod_base = OTHER; note = 2'-O-methyl-cytidine
  modified_base 14: mod_base = OTHER; note = 2'-fluoro-adenosine
  modified_base 15: mod_base = OTHER; note = 2'-O-methyl-adenosine
  modified_base 16: mod_base = OTHER; note = 2'-fluoro-adenosine
  modified_base 17: mod_base = OTHER; note = 2'-O-methyl-adenosine
  modified_base 18: mod_base = OTHER; note = 2'-O-methyl-guanosine
  modified_base 19: mod_base = OTHER; note = 2'-O-methyl-adenosine
  modified_base 20: mod_base = OTHER; note = 2'-O-methyl-cytidine with phosphorothioate linkage
  modified_base 21: mod_base = OTHER; note = 2'-O-methyl-adenosine with phosphorothioate linkage
  modified_base 22: mod_base = OTHER; note = 2'-O-methyl-uridine
tgaagaatcacacaaaagacat

SEQ ID NO: 468 - RNA, 22 nt, synthetic construct
  source 1..22: mol_type = other RNA
  modified_base 1: mod_base = OTHER; note = 2'-O-methyl-uridine with phosphorothioate linkage
  modified_base 2: mod_base = OTHER; note = 2'-fluoro-uridine with phosphorothioate linkage
  modified_base 3: mod_base = OTHER; note = 2'-fluoro-guanosine
  modified_base 4: mod_base = OTHER; note = 2'-O-methyl-adenosine
  modified_base 5: mod_base = OTHER; note = 2'-fluoro-adenosine
  modified_base 6: mod_base = OTHER; note = 2'-O-methyl-guanosine
  modified_base 7: mod_base = OTHER; note = 2'-fluoro-adenosine
  modified_base 8: mod_base = OTHER; note = 2'-O-methyl-adenosine
  modified_base 9: mod_base = OTHER; note = 2'-O-methyl-uridine
  modified_base 10: mod_base = OTHER; note = 2'-fluoro-cytidine
  modified_base 11: mod_base = OTHER; note = 2'-O-methyl-adenosine
  modified_base 12: mod_base = OTHER; note = 2'-O-methyl-cytidine
  modified_base 13: mod_base = OTHER; note = 2'-O-methyl-adenosine
  modified_base 14: mod_base = OTHER; note = 2'-fluoro-cytidine
  modified_base 15: mod_base = OTHER; note = 2'-O-methyl-adenosine
  modified_base 16: mod_base = OTHER; note = 2'-fluoro-adenosine
  modified_base 17: mod_base = OTHER; note = 2'-O-methyl-adenosine
  modified_base 18: mod_base = OTHER; note = 2'-O-methyl-adenosine
  modified_base 19: mod_base = OTHER; note = 2'-O-methyl-guanosine
  modified_base 20: mod_base = OTHER; note = 2'-O-methyl-adenosine with phosphorothioate linkage
  modified_base 21: mod_base = OTHER; note = 2'-O-methyl-cytidine with phosphorothioate linkage
  modified_base 22: mod_base = OTHER; note = 2'-O-methyl-adenosine
ttgaagaatcacacaaaagaca

SEQ ID NO: 469 - RNA, 22 nt, synthetic construct
  source 1..22: mol_type = other RNA
  modified_base 1: mod_base = OTHER; note = 2'-O-methyl-uridine with phosphorothioate linkage
  modified_base 2: mod_base = OTHER; note = 2'-fluoro-uridine with phosphorothioate linkage
  modified_base 3: mod_base = OTHER; note = 2'-fluoro-uridine
  modified_base 4: mod_base = OTHER; note = 2'-O-methyl-uridine
  modified_base 5: mod_base = OTHER; note = 2'-fluoro-guanosine
  modified_base 6: mod_base = OTHER; note = 2'-O-methyl-adenosine
  modified_base 7: mod_base = OTHER; note = 2'-fluoro-adenosine
  modified_base 8: mod_base = OTHER; note = 2'-O-methyl-guanosine
  modified_base 9: mod_base = OTHER; note = 2'-O-methyl-adenosine
  modified_base 10: mod_base = OTHER; note = 2'-fluoro-adenosine
  modified_base 11: mod_base = OTHER; note = 2'-O-methyl-uridine
  modified_base 12: mod_base = OTHER; note = 2'-O-methyl-cytidine
  modified_base 13: mod_base = OTHER; note = 2'-O-methyl-adenosine
  modified_base 14: mod_base = OTHER; note = 2'-fluoro-cytidine
  modified_base 15: mod_base = OTHER; note = 2'-O-methyl-adenosine
  modified_base 16: mod_base = OTHER; note = 2'-fluoro-cytidine
  modified_base 17: mod_base = OTHER; note = 2'-O-methyl-adenosine
  modified_base 18: mod_base = OTHER; note = 2'-O-methyl-adenosine
  modified_base 19: mod_base = OTHER; note = 2'-O-methyl-adenosine
  modified_base 20: mod_base = OTHER; note = 2'-O-methyl-adenosine with phosphorothioate linkage
  modified_base 21: mod_base = OTHER; note = 2'-O-methyl-guanosine with phosphorothioate linkage
  modified_base 22: mod_base = OTHER; note = 2'-O-methyl-adenosine
ttttgaagaatcacacaaaaga

SEQ ID NO: 470 - RNA, 22 nt, synthetic construct
  source 1..22: mol_type = other RNA
  modified_base 1: mod_base = OTHER; note = 2'-O-methyl-uridine with phosphorothioate linkage
  modified_base 2: mod_base = OTHER; note = 2'-fluoro-guanosine with phosphorothioate linkage
  modified_base 3: mod_base = OTHER; note = 2'-fluoro-uridine
  modified_base 4: mod_base = OTHER; note = 2'-O-methyl-uridine
  modified_base 5: mod_base = OTHER; note = 2'-fluoro-uridine
  modified_base 6: mod_base = OTHER; note = 2'-O-methyl-uridine
  modified_base 7: mod_base = OTHER; note = 2'-fluoro-guanosine
  modified_base 8: mod_base = OTHER; note = 2'-O-methyl-guanosine
  modified_base 9: mod_base = OTHER; note = 2'-O-methyl-uridine
  modified_base 10: mod_base = OTHER; note = 2'-fluoro-adenosine
  modified_base 11: mod_base = OTHER; note = 2'-O-methyl-adenosine
  modified_base 12: mod_base = OTHER; note = 2'-O-methyl-cytidine
  modified_base 13: mod_base = OTHER; note = 2'-O-methyl-adenosine
  modified_base 14: mod_base = OTHER; note = 2'-fluoro-uridine
  modified_base 15: mod_base = OTHER; note = 2'-O-methyl-uridine
  modified_base 16: mod_base = OTHER; note = 2'-fluoro-guanosine
  modified_base 17: mod_base = OTHER; note = 2'-O-methyl-uridine
  modified_base 18: mod_base = OTHER; note = 2'-O-methyl-uridine
  modified_base 19: mod_base = OTHER; note = 2'-O-methyl-guanosine
  modified_base 20: mod_base = OTHER; note = 2'-O-methyl-guanosine with phosphorothioate linkage
  modified_base 21: mod_base = OTHER; note = 2'-O-methyl-adenosine with phosphorothioate linkage
  modified_base 22: mod_base = OTHER; note = 2'-O-methyl-adenosine
tgttttggtaacattgttggaa

SEQ ID NO: 471 - RNA, 22 nt, synthetic construct
  source 1..22: mol_type = other RNA
  modified_base 1: mod_base = OTHER; note = 2'-O-methyl-uridine with phosphorothioate linkage
  modified_base 2: mod_base = OTHER; note = 2'-fluoro-cytidine with phosphorothioate linkage
  modified_base 3: mod_base = OTHER; note = 2'-fluoro-guanosine
  modified_base 4: mod_base = OTHER; note = 2'-O-methyl-guanosine
  modified_base 5: mod_base = OTHER; note = 2'-fluoro-uridine
  modified_base 6: mod_base = OTHER; note = 2'-O-methyl-uridine
  modified_base 7: mod_base = OTHER; note = 2'-fluoro-uridine
  modified_base 8: mod_base = OTHER; note = 2'-O-methyl-uridine
  modified_base 9: mod_base = OTHER; note = 2'-O-methyl-guanosine
  modified_base 10: mod_base = OTHER; note = 2'-fluoro-guanosine
  modified_base 11: mod_base = OTHER; note = 2'-O-methyl-uridine
  modified_base 12: mod_base = OTHER; note = 2'-O-methyl-adenosine
  modified_base 13: mod_base = OTHER; note = 2'-O-methyl-adenosine
  modified_base 14: mod_base = OTHER; note = 2'-fluoro-cytidine
  modified_base 15: mod_base = OTHER; note = 2'-O-methyl-adenosine
  modified_base 16: mod_base = OTHER; note = 2'-fluoro-uridine
  modified_base 17: mod_base = OTHER; note = 2'-O-methyl-uridine
  modified_base 18: mod_base = OTHER; note = 2'-O-methyl-guanosine
  modified_base 19: mod_base = OTHER; note = 2'-O-methyl-uridine
  modified_base 20: mod_base = OTHER; note = 2'-O-methyl-uridine with phosphorothioate linkage
  modified_base 21: mod_base = OTHER; note = 2'-O-methyl-guanosine with phosphorothioate linkage
  modified_base 22: mod_base = OTHER; note = 2'-O-methyl-guanosine
tcggttttggtaacattgttgg

SEQ ID NO: 472 - RNA, 22 nt, synthetic construct
  source 1..22: mol_type = other RNA
  modified_base 1: mod_base = OTHER; note = 2'-O-methyl-uridine with phosphorothioate linkage
  modified_base 2: mod_base = OTHER; note = 2'-fluoro-uridine with phosphorothioate linkage
  modified_base 3: mod_base = OTHER; note = 2'-fluoro-uridine
  modified_base 4: mod_base = OTHER; note = 2'-O-methyl-cytidine
  modified_base 5: mod_base = OTHER; note = 2'-fluoro-guanosine
  modified_base 6: mod_base = OTHER; note = 2'-O-methyl-guanosine
  modified_base 7: mod_base = OTHER; note = 2'-fluoro-uridine
  modified_base 8: mod_base = OTHER; note = 2'-O-methyl-uridine
  modified_base 9: mod_base = OTHER; note = 2'-O-methyl-uridine
  modified_base 10: mod_base = OTHER; note = 2'-fluoro-uridine
  modified_base 11: mod_base = OTHER; note = 2'-O-methyl-guanosine
  modified_base 12: mod_base = OTHER; note = 2'-O-methyl-guanosine
  modified_base 13: mod_base = OTHER; note = 2'-O-methyl-uridine
  modified_base 14: mod_base = OTHER; note = 2'-fluoro-adenosine
  modified_base 15: mod_base = OTHER; note = 2'-O-methyl-adenosine
  modified_base 16: mod_base = OTHER; note = 2'-fluoro-cytidine
  modified_base 17: mod_base = OTHER; note = 2'-O-methyl-adenosine
  modified_base 18: mod_base = OTHER; note = 2'-O-methyl-uridine
  modified_base 19: mod_base = OTHER; note = 2'-O-methyl-uridine
  modified_base 20: mod_base = OTHER; note = 2'-O-methyl-guanosine with phosphorothioate linkage
  modified_base 21: mod_base = OTHER; note = 2'-O-methyl-uridine with phosphorothioate linkage
  modified_base 22: mod_base = OTHER; note = 2'-O-methyl-uridine
tttcggttttggtaacattgtt

SEQ ID NO: 473 - RNA, 22 nt, synthetic construct
  source 1..22: mol_type = other RNA
  modified_base 1: mod_base = OTHER; note = 2'-O-methyl-uridine with phosphorothioate linkage
  modified_base 2: mod_base = OTHER; note = 2'-fluoro-cytidine with phosphorothioate linkage
  modified_base 3: mod_base = OTHER; note = 2'-fluoro-adenosine
  modified_base 4: mod_base = OTHER; note = 2'-O-methyl-uridine
  modified_base 5: mod_base = OTHER; note = 2'-fluoro-uridine
  modified_base 6: mod_base = OTHER; note = 2'-O-methyl-cytidine
  modified_base 7: mod_base = OTHER; note = 2'-fluoro-guanosine
  modified_base 8: mod_base = OTHER; note = 2'-O-methyl-guanosine
  modified_base 9: mod_base = OTHER; note = 2'-O-methyl-uridine
  modified_base 10: mod_base = OTHER; note = 2'-fluoro-uridine
  modified_base 11: mod_base = OTHER; note = 2'-O-methyl-uridine
  modified_base 12: mod_base = OTHER; note = 2'-O-methyl-uridine
  modified_base 13: mod_base = OTHER; note = 2'-O-methyl-guanosine
  modified_base 14: mod_base = OTHER; note = 2'-fluoro-guanosine
  modified_base 15: mod_base = OTHER; note = 2'-O-methyl-uridine
  modified_base 16: mod_base = OTHER; note = 2'-fluoro-adenosine
  modified_base 17: mod_base = OTHER; note = 2'-O-methyl-adenosine
  modified_base 18: mod_base = OTHER; note = 2'-O-methyl-cytidine
  modified_base 19: mod_base = OTHER; note = 2'-O-methyl-adenosine
  modified_base 20: mod_base = OTHER; note = 2'-O-methyl-uridine with phosphorothioate linkage
  modified_base 21: mod_base = OTHER; note = 2'-O-methyl-uridine with phosphorothioate linkage
  modified_base 22: mod_base = OTHER; note = 2'-O-methyl-guanosine
tcattcggttttggtaacattg

SEQ ID NO: 474 - RNA, 22 nt, synthetic construct
  source 1..22: mol_type = other RNA
  modified_base 1: mod_base = OTHER; note = 2'-O-methyl-uridine with phosphorothioate linkage
  modified_base 2: mod_base = OTHER; note = 2'-fluoro-adenosine with phosphorothioate linkage
  modified_base 3: mod_base = OTHER; note = 2'-fluoro-guanosine
  modified_base 4: mod_base = OTHER; note = 2'-O-methyl-cytidine
  modified_base 5: mod_base = OTHER; note = 2'-fluoro-adenosine
  modified_base 6: mod_base = OTHER; note = 2'-O-methyl-uridine
  modified_base 7: mod_base = OTHER; note = 2'-fluoro-uridine
  modified_base 8: mod_base = OTHER; note = 2'-O-methyl-cytidine
  modified_base 9: mod_base = OTHER; note = 2'-O-methyl-guanosine
  modified_base 10: mod_base = OTHER; note = 2'-fluoro-guanosine
  modified_base 11: mod_base = OTHER; note = 2'-O-methyl-uridine
  modified_base 12: mod_base = OTHER; note = 2'-O-methyl-uridine
  modified_base 13: mod_base = OTHER; note = 2'-O-methyl-uridine
  modified_base 14: mod_base = OTHER; note = 2'-fluoro-uridine
  modified_base 15: mod_base = OTHER; note = 2'-O-methyl-guanosine
  modified_base 16: mod_base = OTHER; note = 2'-fluoro-guanosine
  modified_base 17: mod_base = OTHER; note = 2'-O-methyl-uridine
  modified_base 18: mod_base = OTHER; note = 2'-O-methyl-adenosine
  modified_base 19: mod_base = OTHER; note = 2'-O-methyl-adenosine
  modified_base 20: mod_base = OTHER; note = 2'-O-methyl-cytidine with phosphorothioate linkage
  modified_base 21: mod_base = OTHER; note = 2'-O-methyl-adenosine with phosphorothioate linkage
  modified_base 22: mod_base = OTHER; note = 2'-O-methyl-uridine
tagcattcggttttggtaacat

SEQ ID NO: 475 - RNA, 22 nt, synthetic construct
  source 1..22: mol_type = other RNA
  modified_base 1: mod_base = OTHER; note = 2'-O-methyl-uridine with phosphorothioate linkage
  modified_base 2: mod_base = OTHER; note = 2'-fluoro-adenosine with phosphorothioate linkage
  modified_base 3: mod_base = OTHER; note = 2'-fluoro-adenosine
  modified_base 4: mod_base = OTHER; note = 2'-O-methyl-guanosine
  modified_base 5: mod_base = OTHER; note = 2'-fluoro-cytidine
  modified_base 6: mod_base = OTHER; note = 2'-O-methyl-adenosine
  modified_base 7: mod_base = OTHER; note = 2'-fluoro-guanosine
  modified_base 8: mod_base = OTHER; note = 2'-O-methyl-cytidine
  modified_base 9: mod_base = OTHER; note = 2'-O-methyl-adenosine
  modified_base 10: mod_base = OTHER; note = 2'-fluoro-uridine
  modified_base 11: mod_base = OTHER; note = 2'-O-methyl-uridine
  modified_base 12: mod_base = OTHER; note = 2'-O-methyl-cytidine
  modified_base 13: mod_base = OTHER; note = 2'-O-methyl-guanosine
  modified_base 14: mod_base = OTHER; note = 2'-fluoro-guanosine
  modified_base 15: mod_base = OTHER; note = 2'-O-methyl-uridine
  modified_base 16: mod_base = OTHER; note = 2'-fluoro-uridine
  modified_base 17: mod_base = OTHER; note = 2'-O-methyl-uridine
  modified_base 18: mod_base = OTHER; note = 2'-O-methyl-uridine
  modified_base 19: mod_base = OTHER; note = 2'-O-methyl-guanosine
  modified_base 20: mod_base = OTHER; note = 2'-O-methyl-guanosine with phosphorothioate linkage
  modified_base 21: mod_base = OTHER; note = 2'-O-methyl-uridine with phosphorothioate linkage
  modified_base 22: mod_base = OTHER; note = 2'-O-methyl-adenosine
taagcagcattcggttttggta

SEQ ID NO: 476 - RNA, 22 nt, synthetic construct
  source 1..22: mol_type = other RNA
  modified_base 1: mod_base = OTHER; note = 2'-O-methyl-uridine with phosphorothioate linkage
  modified_base 2: mod_base = OTHER; note = 2'-fluoro-guanosine with phosphorothioate linkage
  modified_base 3: mod_base = OTHER; note = 2'-fluoro-uridine
  modified_base 4: mod_base = OTHER; note = 2'-O-methyl-uridine
  modified_base 5: mod_base = OTHER; note = 2'-fluoro-guanosine
  modified_base 6: mod_base = OTHER; note = 2'-O-methyl-cytidine
  modified_base 7: mod_base = OTHER; note = 2'-fluoro-adenosine
  modified_base 8: mod_base = OTHER; note = 2'-O-methyl-adenosine
  modified_base 9: mod_base = OTHER; note = 2'-O-methyl-adenosine
  modified_base 10: mod_base = OTHER; note = 2'-fluoro-adenosine
  modified_base 11: mod_base = OTHER; note = 2'-O-methyl-adenosine
  modified_base 12: mod_base = OTHER; note = 2'-O-methyl-uridine
  modified_base 13: mod_base = OTHER; note = 2'-O-methyl-cytidine
  modified_base 14: mod_base = OTHER; note = 2'-fluoro-uridine
  modified_base 15: mod_base = OTHER; note = 2'-O-methyl-guanosine
  modified_base 16: mod_base = OTHER; note = 2'-fluoro-uridine
  modified_base 17: mod_base = OTHER; note = 2'-O-methyl-guanosine
  modified_base 18: mod_base = OTHER; note = 2'-O-methyl-adenosine
  modified_base 19: mod_base = OTHER; note = 2'-O-methyl-adenosine
  modified_base 20: mod_base = OTHER; note = 2'-O-methyl-guanosine with phosphorothioate linkage
  modified_base 21: mod_base = OTHER; note = 2'-O-methyl-cytidine with phosphorothioate linkage
  modified_base 22: mod_base = OTHER; note = 2'-O-methyl-adenosine
tgttgcaaaaatctgtgaagca

SEQ ID NO: 477 - RNA, 22 nt, synthetic construct
  source 1..22: mol_type = other RNA
  modified_base 1: mod_base = OTHER; note = 2'-O-methyl-uridine with phosphorothioate linkage
  modified_base 2: mod_base = OTHER; note = 2'-fluoro-uridine with phosphorothioate linkage
  modified_base 3: mod_base = OTHER; note = 2'-fluoro-guanosine
  modified_base 4: mod_base = OTHER; note = 2'-O-methyl-uridine
  modified_base 5: mod_base = OTHER; note = 2'-fluoro-uridine
  modified_base 6: mod_base = OTHER; note = 2'-O-methyl-guanosine
  modified_base 7: mod_base = OTHER; note = 2'-fluoro-cytidine
  modified_base 8: mod_base = OTHER; note = 2'-O-methyl-adenosine
  modified_base 9: mod_base = OTHER; note = 2'-O-methyl-adenosine
  modified_base 10: mod_base = OTHER; note = 2'-fluoro-adenosine
  modified_base 11: mod_base = OTHER; note = 2'-O-methyl-adenosine
  modified_base 12: mod_base = OTHER; note = 2'-O-methyl-adenosine
  modified_base 13: mod_base = OTHER; note = 2'-O-methyl-uridine
  modified_base 14: mod_base = OTHER; note = 2'-fluoro-cytidine
  modified_base 15: mod_base = OTHER; note = 2'-O-methyl-uridine
  modified_base 16: mod_base = OTHER; note = 2'-fluoro-guanosine
  modified_base 17: mod_base = OTHER; note = 2'-O-methyl-uridine
  modified_base 18: mod_base = OTHER; note = 2'-O-methyl-guanosine
  modified_base 19: mod_base = OTHER; note = 2'-O-methyl-adenosine
  modified_base 20: mod_base = OTHER; note = 2'-O-methyl-adenosine with phosphorothioate linkage
  modified_base 21: mod_base = OTHER; note = 2'-O-methyl-guanosine with phosphorothioate linkage
  modified_base 22: mod_base = OTHER; note = 2'-O-methyl-cytidine
ttgttgcaaaaatctgtgaagc

SEQ ID NO: 478 - RNA, 22 nt, synthetic construct
  source 1..22: mol_type = other RNA
  modified_base 1: mod_base = OTHER; note = 2'-O-methyl-uridine with phosphorothioate linkage
  modified_base 2: mod_base = OTHER; note = 2'-fluoro-uridine with phosphorothioate linkage
  modified_base 3: mod_base = OTHER; note = 2'-fluoro-uridine
  modified_base 4: mod_base = OTHER; note = 2'-O-methyl-guanosine
  modified_base 5: mod_base = OTHER; note = 2'-fluoro-uridine
  modified_base 6: mod_base = OTHER; note = 2'-O-methyl-uridine
  modified_base 7: mod_base = OTHER; note = 2'-fluoro-guanosine
  modified_base 8: mod_base = OTHER; note = 2'-O-methyl-cytidine
  modified_base 9: mod_base = OTHER; note = 2'-O-methyl-adenosine
  modified_base 10: mod_base = OTHER; note = 2'-fluoro-adenosine
  modified_base 11: mod_base = OTHER; note = 2'-O-methyl-adenosine
  modified_base 12: mod_base = OTHER; note = 2'-O-methyl-adenosine
  modified_base 13: mod_base = OTHER; note = 2'-O-methyl-adenosine
  modified_base 14: mod_base = OTHER; note = 2'-fluoro-uridine
  modified_base 15: mod_base = OTHER; note = 2'-O-methyl-cytidine
  modified_base 16: mod_base = OTHER; note = 2'-fluoro-uridine
  modified_base 17: mod_base = OTHER; note = 2'-O-methyl-guanosine
  modified_base 18: mod_base = OTHER; note = 2'-O-methyl-uridine
  modified_base 19: mod_base = OTHER; note = 2'-O-methyl-guanosine
  modified_base 20: mod_base = OTHER; note = 2'-O-methyl-adenosine with phosphorothioate linkage
  modified_base 21: mod_base = OTHER; note = 2'-O-methyl-adenosine with phosphorothioate linkage
  modified_base 22: mod_base = OTHER; note = 2'-O-methyl-guanosine
tttgttgcaaaaatctgtgaag

SEQ ID NO: 479 - RNA, 22 nt, synthetic construct
  source 1..22: mol_type = other RNA
  modified_base 1: mod_base = OTHER; note = 2'-O-methyl-uridine with phosphorothioate linkage
  modified_base 2: mod_base = OTHER; note = 2'-fluoro-guanosine with phosphorothioate linkage
  modified_base 3: mod_base = OTHER; note = 2'-fluoro-uridine
  modified_base 4: mod_base = OTHER; note = 2'-O-methyl-uridine
  modified_base 5: mod_base = OTHER; note = 2'-fluoro-guanosine
  modified_base 6: mod_base = OTHER; note = 2'-O-methyl-uridine
  modified_base 7: mod_base = OTHER; note = 2'-fluoro-uridine
  modified_base 8: mod_base = OTHER; note = 2'-O-methyl-guanosine
  modified_base 9: mod_base = OTHER; note = 2'-O-methyl-cytidine
  modified_base 10: mod_base = OTHER; note = 2'-fluoro-adenosine
  modified_base 11: mod_base = OTHER; note = 2'-O-methyl-adenosine
  modified_base 12: mod_base = OTHER; note = 2'-O-methyl-adenosine
  modified_base 13: mod_base = OTHER; note = 2'-O-methyl-adenosine
  modified_base 14: mod_base = OTHER; note = 2'-fluoro-adenosine
  modified_base 15: mod_base = OTHER; note = 2'-O-methyl-uridine
  modified_base 16: mod_base = OTHER; note = 2'-fluoro-cytidine
  modified_base 17: mod_base = OTHER; note = 2'-O-methyl-uridine
  modified_base 18: mod_base = OTHER; note = 2'-O-methyl-guanosine
  modified_base 19: mod_base = OTHER; note = 2'-O-methyl-uridine
  modified_base 20: mod_base = OTHER; note = 2'-O-methyl-guanosine with phosphorothioate linkage
  modified_base 21: mod_base = OTHER; note = 2'-O-methyl-adenosine with phosphorothioate linkage
  modified_base 22: mod_base = OTHER; note = 2'-O-methyl-adenosine
tgttgttgcaaaaatctgtgaa

SEQ ID NO: 480 - RNA, 22 nt, synthetic construct
  source 1..22: mol_type = other RNA
  modified_base 1: mod_base = OTHER; note = 2'-O-methyl-uridine with phosphorothioate linkage
  modified_base 2: mod_base = OTHER; note = 2'-fluoro-uridine with phosphorothioate linkage
  modified_base 3: mod_base = OTHER; note = 2'-fluoro-guanosine
  modified_base 4: mod_base = OTHER; note = 2'-O-methyl-uridine
  modified_base 5: mod_base = OTHER; note = 2'-fluoro-uridine
  modified_base 6: mod_base = OTHER; note = 2'-O-methyl-guanosine
  modified_base 7: mod_base = OTHER; note = 2'-fluoro-uridine
  modified_base 8: mod_base = OTHER; note = 2'-O-methyl-uridine
  modified_base 9: mod_base = OTHER; note = 2'-O-methyl-guanosine
  modified_base 10: mod_base = OTHER; note = 2'-fluoro-cytidine
  modified_base 11: mod_base = OTHER; note = 2'-O-methyl-adenosine
  modified_base 12: mod_base = OTHER; note = 2'-O-methyl-adenosine
  modified_base 13: mod_base = OTHER; note = 2'-O-methyl-adenosine
  modified_base 14: mod_base = OTHER; note = 2'-fluoro-adenosine
  modified_base 15: mod_base = OTHER; note = 2'-O-methyl-adenosine
  modified_base 16: mod_base = OTHER; note = 2'-fluoro-uridine
  modified_base 17: mod_base = OTHER; note = 2'-O-methyl-cytidine
  modified_base 18: mod_base = OTHER; note = 2'-O-methyl-uridine
  modified_base 19: mod_base = OTHER; note = 2'-O-methyl-guanosine
  modified_base 20: mod_base = OTHER; note = 2'-O-methyl-uridine with phosphorothioate linkage
  modified_base 21: mod_base = OTHER; note = 2'-O-methyl-guanosine with phosphorothioate linkage
  modified_base 22: mod_base = OTHER; note = 2'-O-methyl-adenosine
ttgttgttgcaaaaatctgtga

SEQ ID NO: 481 - RNA, 22 nt, synthetic construct
  source 1..22: mol_type = other RNA
  modified_base 1: mod_base = OTHER; note = 2'-O-methyl-uridine with phosphorothioate linkage
  modified_base 2: mod_base = OTHER; note = 2'-fluoro-uridine with phosphorothioate linkage
  modified_base 3: mod_base = OTHER; note = 2'-fluoro-adenosine
  modified_base 4: mod_base = OTHER; note = 2'-O-methyl-uridine
  modified_base 5: mod_base = OTHER; note = 2'-fluoro-guanosine
  modified_base 6: mod_base = OTHER; note = 2'-O-methyl-uridine
  modified_base 7: mod_base = OTHER; note = 2'-fluoro-uridine
  modified_base 8: mod_base = OTHER; note = 2'-O-methyl-guanosine
  modified_base 9: mod_base = OTHER; note = 2'-O-methyl-uridine
  modified_base 10: mod_base = OTHER; note = 2'-fluoro-uridine
  modified_base 11: mod_base = OTHER; note = 2'-O-methyl-guanosine
  modified_base 12: mod_base = OTHER; note = 2'-O-methyl-cytidine
  modified_base 13: mod_base = OTHER; note = 2'-O-methyl-adenosine
  modified_base 14: mod_base = OTHER; note = 2'-fluoro-adenosine
  modified_base 15: mod_base = OTHER; note = 2'-O-methyl-adenosine
  modified_base 16: mod_base = OTHER; note = 2'-fluoro-adenosine
  modified_base 17: mod_base = OTHER; note = 2'-O-methyl-adenosine
  modified_base 18: mod_base = OTHER; note = 2'-O-methyl-uridine
  modified_base 19: mod_base = OTHER; note = 2'-O-methyl-cytidine
  modified_base 20: mod_base = OTHER; note = 2'-O-methyl-uridine with phosphorothioate linkage
  modified_base 21: mod_base = OTHER; note = 2'-O-methyl-guanosine with phosphorothioate linkage
  modified_base 22: mod_base = OTHER; note = 2'-O-methyl-uridine
ttatgttgttgcaaaaatctgt

SEQ ID NO: 482 - RNA, 22 nt, synthetic construct
  source 1..22: mol_type = other RNA
  modified_base 1: mod_base = OTHER; note = 2'-O-methyl-uridine with phosphorothioate linkage
  modified_base 2: mod_base = OTHER; note = 2'-fluoro-uridine with phosphorothioate linkage
  modified_base 3: mod_base = OTHER; note = 2'-fluoro-uridine
  modified_base 4: mod_base = OTHER; note = 2'-O-methyl-adenosine
  modified_base 5: mod_base = OTHER; note = 2'-fluoro-uridine
  modified_base 6: mod_base = OTHER; note = 2'-O-methyl-guanosine
  modified_base 7: mod_base = OTHER; note = 2'-fluoro-uridine
  modified_base 8: mod_base = OTHER; note = 2'-O-methyl-uridine
  modified_base 9: mod_base = OTHER; note = 2'-O-methyl-guanosine
  modified_base 10: mod_base = OTHER; note = 2'-fluoro-uridine
  modified_base 11: mod_base = OTHER; note = 2'-O-methyl-uridine
  modified_base 12: mod_base = OTHER; note = 2'-O-methyl-guanosine
  modified_base 13: mod_base = OTHER; note = 2'-O-methyl-cytidine
  modified_base 14: mod_base = OTHER; note = 2'-fluoro-adenosine
  modified_base 15: mod_base = OTHER; note = 2'-O-methyl-adenosine
  modified_base 16: mod_base = OTHER; note = 2'-fluoro-adenosine
  modified_base 17: mod_base = OTHER; note = 2'-O-methyl-adenosine
  modified_base 18: mod_base = OTHER; note = 2'-O-methyl-adenosine
  modified_base 19: mod_base = OTHER; note = 2'-O-methyl-uridine
  modified_base 20: mod_base = OTHER; note = 2'-O-methyl-cytidine with phosphorothioate linkage
  modified_base 21: mod_base = OTHER; note = 2'-O-methyl-uridine with phosphorothioate linkage
  modified_base 22: mod_base = OTHER; note = 2'-O-methyl-guanosine
tttatgttgttgcaaaaatctg

SEQ ID NO: 483 - RNA, 22 nt, synthetic construct
  source 1..22: mol_type = other RNA
  modified_base 1: mod_base = OTHER; note = 2'-O-methyl-uridine with phosphorothioate linkage
  modified_base 2: mod_base = OTHER; note = 2'-fluoro-adenosine with phosphorothioate linkage
  modified_base 3: mod_base = OTHER; note = 2'-fluoro-cytidine
  modified_base 4: mod_base = OTHER; note = 2'-O-methyl-cytidine
  modified_base 5: mod_base = OTHER; note = 2'-fluoro-adenosine
  modified_base 6: mod_base = OTHER; note = 2'-O-methyl-guanosine
  modified_base 7: mod_base = OTHER; note = 2'-fluoro-adenosine
  modified_base 8: mod_base = OTHER; note = 2'-O-methyl-uridine
  modified_base 9: mod_base = OTHER; note = 2'-O-methyl-uridine
  modified_base 10: mod_base = OTHER; note = 2'-fluoro-guanosine
  modified_base 11: mod_base = OTHER; note = 2'-O-methyl-cytidine
  modified_base 12: mod_base = OTHER; note = 2'-O-methyl-adenosine
  modified_base 13: mod_base = OTHER; note = 2'-O-methyl-cytidine
  modified_base 14: mod_base = OTHER; note = 2'-fluoro-uridine
  modified_base 15: mod_base = OTHER; note = 2'-O-methyl-cytidine
  modified_base 16: mod_base = OTHER; note = 2'-fluoro-adenosine
  modified_base 17: mod_base = OTHER; note = 2'-O-methyl-guanosine
  modified_base 18: mod_base = OTHER; note = 2'-O-methyl-adenosine
  modified_base 19: mod_base = OTHER; note = 2'-O-methyl-guanosine
  modified_base 20: mod_base = OTHER; note = 2'-O-methyl-adenosine with phosphorothioate linkage
  modified_base 21: mod_base = OTHER; note = 2'-O-methyl-guanosine with phosphorothioate linkage
  modified_base 22: mod_base = OTHER; note = 2'-O-methyl-uridine
taccagattgcactcagagagt

SEQ ID NO: 484 - RNA, 22 nt, synthetic construct
  source 1..22: mol_type = other RNA
  modified_base 1: mod_base = OTHER; note = 2'-O-methyl-uridine with phosphorothioate linkage
  modified_base 2: mod_base = OTHER; note = 2'-fluoro-uridine with phosphorothioate linkage
  modified_base 3: mod_base = OTHER; note = 2'-fluoro-adenosine
  modified_base 4: mod_base = OTHER; note = 2'-O-methyl-cytidine
  modified_base 5: mod_base = OTHER; note = 2'-fluoro-cytidine
  modified_base 6: mod_base = OTHER; note = 2'-O-methyl-adenosine
  modified_base 7: mod_base = OTHER; note = 2'-fluoro-guanosine
  modified_base 8: mod_base = OTHER; note = 2'-O-methyl-adenosine
  modified_base 9: mod_base = OTHER; note = 2'-O-methyl-uridine
  modified_base 10: mod_base = OTHER; note = 2'-fluoro-uridine
  modified_base 11: mod_base = OTHER; note = 2'-O-methyl-guanosine
  modified_base 12: mod_base = OTHER; note = 2'-O-methyl-cytidine
  modified_base 13: mod_base = OTHER; note = 2'-O-methyl-adenosine
  modified_base 14: mod_base = OTHER; note = 2'-fluoro-cytidine
  modified_base 15: mod_base = OTHER; note = 2'-O-methyl-uridine
  modified_base 16: mod_base = OTHER; note = 2'-fluoro-cytidine
  modified_base 17: mod_base = OTHER; note = 2'-O-methyl-adenosine
  modified_base 18: mod_base = OTHER; note = 2'-O-methyl-guanosine
  modified_base 19: mod_base = OTHER; note = 2'-O-methyl-adenosine
  modified_base 20: mod_base = OTHER; note = 2'-O-methyl-guanosine with phosphorothioate linkage
  modified_base 21: mod_base = OTHER; note = 2'-O-methyl-adenosine with phosphorothioate linkage
  modified_base 22: mod_base = OTHER; note = 2'-O-methyl-guanosine
ttaccagattgcactcagagag

SEQ ID NO: 485 - RNA, 22 nt, synthetic construct
  source 1..22: mol_type = other RNA
  modified_base 1: mod_base = OTHER; note = 2'-O-methyl-uridine with phosphorothioate linkage
  modified_base 2: mod_base = OTHER; note = 2'-fluoro-uridine with phosphorothioate linkage
  modified_base 3: mod_base = OTHER; note = 2'-fluoro-uridine
  modified_base 4: mod_base = OTHER; note = 2'-O-methyl-adenosine
  modified_base 5: mod_base = OTHER; note = 2'-fluoro-cytidine
  modified_base 6: mod_base = OTHER; note = 2'-O-methyl-cytidine
  modified_base 7: mod_base = OTHER; note = 2'-fluoro-adenosine
  modified_base 8: mod_base = OTHER; note = 2'-O-methyl-guanosine
  modified_base 9: mod_base = OTHER; note = 2'-O-methyl-adenosine
  modified_base 10: mod_base = OTHER; note = 2'-fluoro-uridine
  modified_base 11: mod_base = OTHER; note = 2'-O-methyl-uridine
  modified_base 12: mod_base = OTHER; note = 2'-O-methyl-guanosine
  modified_base 13: mod_base = OTHER; note = 2'-O-methyl-cytidine
  modified_base 14: mod_base = OTHER; note = 2'-fluoro-adenosine
  modified_base 15: mod_base = OTHER; note = 2'-O-methyl-cytidine
  modified_base 16: mod_base = OTHER; note = 2'-fluoro-uridine
  modified_base 17: mod_base = OTHER; note = 2'-O-methyl-cytidine
  modified_base 18: mod_base = OTHER; note = 2'-O-methyl-adenosine
  modified_base 19: mod_base = OTHER; note = 2'-O-methyl-guanosine
  modified_base 20: mod_base = OTHER; note = 2'-O-methyl-adenosine with phosphorothioate linkage
  modified_base 21: mod_base = OTHER; note = 2'-O-methyl-guanosine with phosphorothioate linkage
  modified_base 22: mod_base = OTHER; note = 2'-O-methyl-adenosine
tttaccagattgcactcagaga

SEQ ID NO: 486 - RNA, 22 nt, synthetic construct
  source 1..22: mol_type = other RNA
  modified_base 1: mod_base = OTHER; note = 2'-O-methyl-uridine with phosphorothioate linkage
  modified_base 2: mod_base = OTHER; note = 2'-fluoro-adenosine with phosphorothioate linkage
  modified_base 3: mod_base = OTHER; note = 2'-fluoro-uridine
  modified_base 4: mod_base = OTHER; note = 2'-O-methyl-uridine
  modified_base 5: mod_base = OTHER; note = 2'-fluoro-uridine
  modified_base 6: mod_base = OTHER; note = 2'-O-methyl-adenosine
  modified_base 7: mod_base = OTHER; note = 2'-fluoro-cytidine
  modified_base 8: mod_base = OTHER; note = 2'-O-methyl-cytidine
  modified_base 9: mod_base = OTHER; note = 2'-O-methyl-adenosine
  modified_base 10: mod_base = OTHER; note = 2'-fluoro-guanosine
  modified_base 11: mod_base = OTHER; note = 2'-O-methyl-adenosine
  modified_base 12: mod_base = OTHER; note = 2'-O-methyl-uridine
  modified_base 13: mod_base = OTHER; note = 2'-O-methyl-uridine
  modified_base 14: mod_base = OTHER; note = 2'-fluoro-guanosine
  modified_base 15: mod_base = OTHER; note = 2'-O-methyl-cytidine
  modified_base 16: mod_base = OTHER; note = 2'-fluoro-adenosine
  modified_base 17: mod_base = OTHER; note = 2'-O-methyl-cytidine
  modified_base 18: mod_base = OTHER; note = 2'-O-methyl-uridine
  modified_base 19: mod_base = OTHER; note = 2'-O-methyl-cytidine
  modified_base 20: mod_base = OTHER; note = 2'-O-methyl-adenosine with phosphorothioate linkage
  modified_base 21: mod_base = OTHER; note = 2'-O-methyl-guanosine with phosphorothioate linkage
  modified_base 22: mod_base = OTHER; note = 2'-O-methyl-adenosine
tatttaccagattgcactcaga

SEQ ID NO: 487 - RNA, 22 nt, synthetic construct
  source 1..22: mol_type = other RNA
  modified_base 1: mod_base = OTHER; note = 2'-O-methyl-uridine with phosphorothioate linkage
  modified_base 2: mod_base = OTHER; note = 2'-fluoro-cytidine with phosphorothioate linkage
  modified_base 3: mod_base = OTHER; note = 2'-fluoro-adenosine
  modified_base 4: mod_base = OTHER; note = 2'-O-methyl-uridine
  modified_base 5: mod_base = OTHER; note = 2'-fluoro-uridine
  modified_base 6: mod_base = OTHER; note = 2'-O-methyl-uridine
  modified_base 7: mod_base = OTHER; note = 2'-fluoro-adenosine
  modified_base 8: mod_base = OTHER; note = 2'-O-methyl-cytidine
  modified_base 9: mod_base = OTHER; note = 2'-O-methyl-cytidine
  modified_base 10: mod_base = OTHER; note = 2'-fluoro-adenosine
  modified_base 11: mod_base = OTHER; note = 2'-O-methyl-guanosine
  modified_base 12: mod_base = OTHER; note = 2'-O-methyl-adenosine
  modified_base 13: mod_base = OTHER; note = 2'-O-methyl-uridine
  modified_base 14: mod_base = OTHER; note = 2'-fluoro-uridine
  modified_base 15: mod_base = OTHER; note = 2'-O-methyl-guanosine
  modified_base 16: mod_base = OTHER; note = 2'-fluoro-cytidine
  modified_base 17: mod_base = OTHER; note = 2'-O-methyl-adenosine
  modified_base 18: mod_base = OTHER; note = 2'-O-methyl-cytidine
  modified_base 19: mod_base = OTHER; note = 2'-O-methyl-uridine
  modified_base 20: mod_base = OTHER; note = 2'-O-methyl-cytidine with phosphorothioate linkage
  modified_base 21: mod_base = OTHER; note = 2'-O-methyl-adenosine with phosphorothioate linkage
  modified_base 22: mod_base = OTHER; note = 2'-O-methyl-guanosine
tcatttaccagattgcactcag

SEQ ID NO: 488 - RNA, 22 nt, synthetic construct
  source 1..22: mol_type = other RNA
  modified_base 1: mod_base = OTHER; note = 2'-O-methyl-uridine with phosphorothioate linkage
  modified_base 2: mod_base = OTHER; note = 2'-fluoro-guanosine with phosphorothioate linkage
  modified_base 3: mod_base = OTHER; note = 2'-fluoro-cytidine
  modified_base 4: mod_base = OTHER; note = 2'-O-methyl-adenosine
  modified_base 5: mod_base = OTHER; note = 2'-fluoro-uridine
  modified_base 6: mod_base = OTHER; note = 2'-O-methyl-uridine
  modified_base 7: mod_base = OTHER; note = 2'-fluoro-uridine
  modified_base 8: mod_base = OTHER; note = 2'-O-methyl-adenosine
  modified_base 9: mod_base = OTHER; note = 2'-O-methyl-cytidine
  modified_base 10: mod_base = OTHER; note = 2'-fluoro-cytidine
  modified_base 11: mod_base = OTHER; note = 2'-O-methyl-adenosine
  modified_base 12: mod_base = OTHER; note = 2'-O-methyl-guanosine
  modified_base 13: mod_base = OTHER; note = 2'-O-methyl-adenosine
  modified_base 14: mod_base = OTHER; note = 2'-fluoro-uridine
  modified_base 15: mod_base = OTHER; note = 2'-O-methyl-uridine
  modified_base 16: mod_base = OTHER; note = 2'-fluoro-guanosine
  modified_base 17: mod_base = OTHER; note = 2'-O-methyl-cytidine
  modified_base 18: mod_base = OTHER; note = 2'-O-methyl-adenosine
  modified_base 19: mod_base = OTHER; note = 2'-O-methyl-cytidine
  modified_base 20: mod_base = OTHER; note = 2'-O-methyl-uridine with phosphorothioate linkage
  modified_base 21: mod_base = OTHER; note = 2'-O-methyl-cytidine with phosphorothioate linkage
  modified_base 22: mod_base = OTHER; note = 2'-O-methyl-adenosine
tgcatttaccagattgcactca

SEQ ID NO: 489 - RNA, 22 nt, synthetic construct
  source 1..22: mol_type = other RNA
  modified_base 1: mod_base = OTHER; note = 2'-O-methyl-uridine with phosphorothioate linkage
  modified_base 2: mod_base = OTHER; note = 2'-fluoro-cytidine with phosphorothioate linkage
  modified_base 3: mod_base = OTHER; note = 2'-fluoro-cytidine
  modified_base 4: mod_base = OTHER; note = 2'-O-methyl-adenosine
  modified_base 5: mod_base = OTHER; note = 2'-fluoro-guanosine
  modified_base 6: mod_base = OTHER; note = 2'-O-methyl-cytidine
  modified_base 7: mod_base = OTHER; note = 2'-fluoro-cytidine
  modified_base 8: mod_base = OTHER; note = 2'-O-methyl-adenosine
  modified_base 9: mod_base = OTHER; note = 2'-O-methyl-adenosine
  modified_base 10: mod_base = OTHER; note = 2'-fluoro-adenosine
  modified_base 11: mod_base = OTHER; note = 2'-O-methyl-guanosine
  modified_base 12: mod_base = OTHER; note = 2'-O-methyl-uridine
  modified_base 13: mod_base = OTHER; note = 2'-O-methyl-uridine
  modified_base 14: mod_base = OTHER; note = 2'-fluoro-guanosine
  modified_base 15: mod_base = OTHER; note = 2'-O-methyl-adenosine
  modified_base 16: mod_base = OTHER; note = 2'-fluoro-guanosine
  modified_base 17: mod_base = OTHER; note = 2'-O-methyl-uridine
  modified_base 18: mod_base = OTHER; note = 2'-O-methyl-cytidine
  modified_base 19: mod_base = OTHER; note = 2'-O-methyl-cytidine
  modified_base 20: mod_base = OTHER; note = 2'-O-methyl-adenosine with phosphorothioate linkage
  modified_base 21: mod_base = OTHER; note = 2'-O-methyl-adenosine with phosphorothioate linkage
  modified_base 22: mod_base = OTHER; note = 2'-O-methyl-guanosine
tccagccaaagttgagtccaag

SEQ ID NO: 490 - RNA, 22 nt, synthetic construct
  source 1..22: mol_type = other RNA
  modified_base 1: mod_base = OTHER; note = 2'-O-methyl-uridine with phosphorothioate linkage
  modified_base 2: mod_base = OTHER; note = 2'-fluoro-uridine with phosphorothioate linkage
  modified_base 3: mod_base = OTHER; note = 2'-fluoro-adenosine
  modified_base 4: mod_base = OTHER; note = 2'-O-methyl-cytidine
  modified_base 5: mod_base = OTHER; note = 2'-fluoro-cytidine
  modified_base 6: mod_base = OTHER; note = 2'-O-methyl-adenosine
  modified_base 7: mod_base = OTHER; note = 2'-fluoro-guanosine
  modified_base 8: mod_base = OTHER; note = 2'-O-methyl-cytidine
  modified_base 9: mod_base = OTHER; note = 2'-O-methyl-cytidine
  modified_base 10: mod_base = OTHER; note = 2'-fluoro-adenosine
  modified_base 11: mod_base = OTHER; note = 2'-O-methyl-adenosine
  modified_base 12: mod_base = OTHER; note = 2'-O-methyl-adenosine
  modified_base 13: mod_base = OTHER; note = 2'-O-methyl-guanosine
  modified_base 14: mod_base = OTHER; note = 2'-fluoro-uridine
  modified_base 15: mod_base = OTHER; note = 2'-O-methyl-uridine
  modified_base 16: mod_base = OTHER; note = 2'-fluoro-guanosine
  modified_base 17: mod_base = OTHER; note = 2'-O-methyl-adenosine
  modified_base 18: mod_base = OTHER; note = 2'-O-methyl-guanosine
  modified_base 19: mod_base = OTHER; note = 2'-O-methyl-uridine
  modified_base 20: mod_base = OTHER; note = 2'-O-methyl-cytidine with phosphorothioate linkage
  modified_base 21: mod_base = OTHER; note = 2'-O-methyl-cytidine with phosphorothioate linkage
  modified_base 22: mod_base = OTHER; note = 2'-O-methyl-adenosine
ttaccagccaaagttgagtcca

SEQ ID NO: 491 - RNA, 22 nt, synthetic construct
  source 1..22: mol_type = other RNA
  modified_base 1: mod_base = OTHER; note = 2'-O-methyl-uridine with phosphorothioate linkage
  modified_base 2: mod_base = OTHER; note = 2'-fluoro-adenosine with phosphorothioate linkage
  modified_base 3: mod_base = OTHER; note = 2'-fluoro-uridine
  modified_base 4: mod_base = OTHER; note = 2'-O-methyl-adenosine
  modified_base 5: mod_base = OTHER; note = 2'-fluoro-uridine
  modified_base 6: mod_base = OTHER; note = 2'-O-methyl-uridine
  modified_base 7: mod_base = OTHER; note = 2'-fluoro-cytidine
  modified_base 8: mod_base = OTHER; note = 2'-O-methyl-adenosine
  modified_base 9: mod_base = OTHER; note = 2'-O-methyl-guanosine
  modified_base 10: mod_base = OTHER; note = 2'-fluoro-adenosine
  modified_base 11: mod_base = OTHER; note = 2'-O-methyl-uridine
  modified_base 12: mod_base = OTHER; note = 2'-O-methyl-adenosine
  modified_base 13: mod_base = OTHER; note = 2'-O-methyl-cytidine
  modified_base 14: mod_base = OTHER; note = 2'-fluoro-cytidine
  modified_base 15: mod_base = OTHER; note = 2'-O-methyl-adenosine
  modified_base 16: mod_base = OTHER; note = 2'-fluoro-guanosine
  modified_base 17: mod_base = OTHER; note = 2'-O-methyl-cytidine
  modified_base 18: mod_base = OTHER; note = 2'-O-methyl-cytidine
  modified_base 19: mod_base = OTHER; note = 2'-O-methyl-adenosine
  modified_base 20: mod_base = OTHER; note = 2'-O-methyl-adenosine with phosphorothioate linkage
  modified_base 21: mod_base = OTHER; note = 2'-O-methyl-adenosine with phosphorothioate linkage
  modified_base 22: mod_base = OTHER; note = 2'-O-methyl-guanosine
tatattcagataccagccaaag

SEQ ID NO: 492 - RNA, 22 nt, synthetic construct
  source 1..22: mol_type = other RNA
  modified_base 1: mod_base = OTHER; note = 2'-O-methyl-uridine with phosphorothioate linkage
  modified_base 2: mod_base = OTHER; note = 2'-fluoro-cytidine with phosphorothioate linkage
  modified_base 3: mod_base = OTHER; note = 2'-fluoro-uridine
  modified_base 4: mod_base = OTHER; note = 2'-O-methyl-uridine
  modified_base 5: mod_base = OTHER; note = 2'-fluoro-uridine
  modified_base 6: mod_base = OTHER; note = 2'-O-methyl-guanosine
  modified_base 7: mod_base = OTHER; note = 2'-fluoro-adenosine
  modified_base 8: mod_base = OTHER; note = 2'-O-methyl-uridine
  modified_base 9: mod_base = OTHER; note = 2'-O-methyl-uridine
  modified_base 10: mod_base = OTHER; note = 2'-fluoro-uridine
  modified_base 11: mod_base = OTHER; note = 2'-O-methyl-uridine
  modified_base 12: mod_base = OTHER; note = 2'-O-methyl-adenosine
  modified_base 13: mod_base = OTHER; note = 2'-O-methyl-uridine
  modified_base 14: mod_base = OTHER; note = 2'-fluoro-guanosine
  modified_base 15: mod_base = OTHER; note = 2'-O-methyl-uridine
  modified_base 16: mod_base = OTHER; note = 2'-fluoro-cytidine
  modified_base 17: mod_base = OTHER; note = 2'-O-methyl-uridine
  modified_base 18: mod_base = OTHER; note = 2'-O-methyl-cytidine
  modified_base 19: mod_base = OTHER; note = 2'-O-methyl-guanosine
  modified_base 20: mod_base = OTHER; note = 2'-O-methyl-adenosine with phosphorothioate linkage
  modified_base 21: mod_base = OTHER; note = 2'-O-methyl-uridine with phosphorothioate linkage
  modified_base 22: mod_base = OTHER; note = 2'-O-methyl-guanosine
tctttgattttatgtctcgatg

SEQ ID NO: 493 - RNA, 22 nt, synthetic construct
  source 1..22: mol_type = other RNA
  modified_base 1: mod_base = OTHER; note = 2'-O-methyl-uridine with phosphorothioate linkage
  modified_base 2: mod_base = OTHER; note = 2'-fluoro-uridine with phosphorothioate linkage
  modified_base 3: mod_base = OTHER; note = 2'-fluoro-uridine
  modified_base 4: mod_base = OTHER; note = 2'-O-methyl-cytidine
  modified_base 5: mod_base = OTHER; note = 2'-fluoro-uridine
  modified_base 6: mod_base = OTHER; note = 2'-O-methyl-uridine
  modified_base 7: mod_base = OTHER; note = 2'-fluoro-uridine
  modified_base 8: mod_base = OTHER; note = 2'-O-methyl-guanosine
  modified_base 9: mod_base = OTHER; note = 2'-O-methyl-adenosine
  modified_base 10: mod_base = OTHER; note = 2'-fluoro-uridine
  modified_base 11: mod_base = OTHER; note = 2'-O-methyl-uridine
  modified_base 12: mod_base = OTHER; note = 2'-O-methyl-uridine
  modified_base 13: mod_base = OTHER; note = 2'-O-methyl-uridine
  modified_base 14: mod_base = OTHER; note = 2'-fluoro-adenosine
  modified_base 15: mod_base = OTHER; note = 2'-O-methyl-uridine
  modified_base 16: mod_base = OTHER; note = 2'-fluoro-guanosine
  modified_base 17: mod_base = OTHER; note = 2'-O-methyl-uridine
  modified_base 18: mod_base = OTHER; note = 2'-O-methyl-cytidine
  modified_base 19: mod_base = OTHER; note = 2'-O-methyl-uridine
  modified_base 20: mod_base = OTHER; note = 2'-O-methyl-cytidine with phosphorothioate linkage
  modified_base 21: mod_base = OTHER; note = 2'-O-methyl-guanosine with phosphorothioate linkage
  modified_base 22: mod_base = OTHER; note = 2'-O-methyl-adenosine
tttctttgattttatgtctcga

SEQ ID NO: 494 - RNA, 22 nt, synthetic construct
  source 1..22: mol_type = other RNA
  modified_base 1: mod_base = OTHER; note = 2'-O-methyl-uridine with phosphorothioate linkage
  modified_base 2: mod_base = OTHER; note = 2'-fluoro-uridine with phosphorothioate linkage
  modified_base 3: mod_base = OTHER; note = 2'-fluoro-cytidine
  modified_base 4: mod_base = OTHER; note = 2'-O-methyl-adenosine
  modified_base 5: mod_base = OTHER; note = 2'-fluoro-cytidine
  modified_base 6: mod_base = OTHER; note = 2'-O-methyl-adenosine
  modified_base 7: mod_base = OTHER; note = 2'-fluoro-adenosine
  modified_base 8: mod_base = OTHER; note = 2'-O-methyl-cytidine
  modified_base 9: mod_base = OTHER; note = 2'-O-methyl-uridine
  modified_base 10: mod_base = OTHER; note = 2'-fluoro-uridine
  modified_base 11: mod_base = OTHER; note = 2'-O-methyl-uridine
  modified_base 12: mod_base = OTHER; note = 2'-O-methyl-guanosine
  modified_base 13: mod_base = OTHER; note = 2'-O-methyl-cytidine
  modified_base 14: mod_base = OTHER; note = 2'-fluoro-cytidine
  modified_base 15: mod_base = OTHER; note = 2'-O-methyl-adenosine
  modified_base 16: mod_base = OTHER; note = 2'-fluoro-cytidine
  modified_base 17: mod_base = OTHER; note = 2'-O-methyl-uridine
  modified_base 18: mod_base = OTHER; note = 2'-O-methyl-guanosine
  modified_base 19: mod_base = OTHER; note = 2'-O-methyl-guanosine
  modified_base 20: mod_base = OTHER; note = 2'-O-methyl-uridine with phosphorothioate linkage
  modified_base 21: mod_base = OTHER; note = 2'-O-methyl-uridine with phosphorothioate linkage
  modified_base 22: mod_base = OTHER; note = 2'-O-methyl-uridine
ttcacaactttgccactggttt

SEQ ID NO: 495 - RNA, 22 nt, synthetic construct
  source 1..22: mol_type = other RNA
  modified_base 1: mod_base = OTHER; note = 2'-O-methyl-uridine with phosphorothioate linkage
  modified_base 2: mod_base = OTHER; note = 2'-fluoro-guanosine with phosphorothioate linkage
  modified_base 3: mod_base = OTHER; note = 2'-fluoro-uridine
  modified_base 4: mod_base = OTHER; note = 2'-O-methyl-cytidine
  modified_base 5: mod_base = OTHER; note = 2'-fluoro-uridine
  modified_base 6: mod_base = OTHER; note = 2'-O-methyl-uridine
  modified_base 7: mod_base = OTHER; note = 2'-fluoro-cytidine
  modified_base 8: mod_base = OTHER; note = 2'-O-methyl-uridine
  modified_base 9: mod_base = OTHER; note = 2'-O-methyl-uridine
  modified_base 10: mod_base = OTHER; note = 2'-fluoro-adenosine
  modified_base 11: mod_base = OTHER; note = 2'-O-methyl-adenosine
  modified_base 12: mod_base = OTHER; note = 2'-O-methyl-uridine
  modified_base 13: mod_base = OTHER; note = 2'-O-methyl-adenosine
  modified_base 14: mod_base = OTHER; note = 2'-fluoro-cytidine
  modified_base 15: mod_base = OTHER; note = 2'-O-methyl-guanosine
  modified_base 16: mod_base = OTHER; note = 2'-fluoro-adenosine
  modified_base 17: mod_base = OTHER; note = 2'-O-methyl-adenosine
  modified_base 18: mod_base = OTHER; note = 2'-O-methyl-guanosine
  modified_base 19: mod_base = OTHER; note = 2'-O-methyl-adenosine
  modified_base 20: mod_base = OTHER; note = 2'-O-methyl-guanosine with phosphorothioate linkage
  modified_base 21: mod_base = OTHER; note = 2'-O-methyl-cytidine with phosphorothioate linkage
  modified_base 22: mod_base = OTHER; note = 2'-O-methyl-adenosine
tgtcttcttaatacgaagagca

SEQ ID NO: 496 - RNA, 22 nt, synthetic construct
  source 1..22: mol_type = other RNA
  modified_base 1: mod_base = OTHER; note = 2'-O-methyl-uridine with phosphorothioate linkage
  modified_base 2: mod_base = OTHER; note = 2'-fluoro-adenosine with phosphorothioate linkage
  modified_base 3: mod_base = OTHER; note = 2'-fluoro-guanosine
  modified_base 4: mod_base = OTHER; note = 2'-O-methyl-uridine
  modified_base 5: mod_base = OTHER; note = 2'-fluoro-cytidine
  modified_base 6: mod_base = OTHER; note = 2'-O-methyl-uridine
  modified_base 7: mod_base = OTHER; note = 2'-fluoro-uridine
  modified_base 8: mod_base = OTHER; note = 2'-O-methyl-cytidine
  modified_base 9: mod_base = OTHER; note = 2'-O-methyl-uridine
  modified_base 10: mod_base = OTHER; note = 2'-fluoro-uridine
  modified_base 11: mod_base = OTHER; note = 2'-O-methyl-adenosine
  modified_base 12: mod_base = OTHER; note = 2'-O-methyl-adenosine
  modified_base 13: mod_base = OTHER; note = 2'-O-methyl-uridine
  modified_base 14: mod_base = OTHER; note = 2'-fluoro-adenosine
  modified_base 15: mod_base = OTHER; note = 2'-O-methyl-cytidine
  modified_base 16: mod_base = OTHER; note = 2'-fluoro-guanosine
  modified_base 17: mod_base = OTHER; note = 2'-O-methyl-adenosine
  modified_base 18: mod_base = OTHER; note = 2'-O-methyl-adenosine
  modified_base 19: mod_base = OTHER; note = 2'-O-methyl-guanosine
  modified_base 20: mod_base = OTHER; note = 2'-O-methyl-adenosine with phosphorothioate linkage
  modified_base 21: mod_base = OTHER; note = 2'-O-methyl-guanosine with phosphorothioate linkage
  modified_base 22: mod_base = OTHER; note = 2'-O-methyl-cytidine
tagtcttcttaatacgaagagc

SEQ ID NO: 497 - RNA, 22 nt, synthetic construct
  source 1..22: mol_type = other RNA
  modified_base 1: mod_base = OTHER; note = 2'-O-methyl-uridine with phosphorothioate linkage
  modified_base 2: mod_base = OTHER; note = 2'-fluoro-adenosine with phosphorothioate linkage
  modified_base 3: mod_base = OTHER; note = 2'-fluoro-uridine
  modified_base 4: mod_base = OTHER; note = 2'-O-methyl-adenosine
  modified_base 5: mod_base = OTHER; note = 2'-fluoro-guanosine
  modified_base 6: mod_base = OTHER; note = 2'-O-methyl-uridine
  modified_base 7: mod_base = OTHER; note = 2'-fluoro-cytidine
  modified_base 8: mod_base = OTHER; note = 2'-O-methyl-uridine
  modified_base 9: mod_base = OTHER; note = 2'-O-methyl-uridine
  modified_base 10: mod_base = OTHER; note = 2'-fluoro-cytidine
  modified_base 11: mod_base = OTHER; note = 2'-O-methyl-uridine
  modified_base 12: mod_base = OTHER; note = 2'-O-methyl-uridine
  modified_base 13: mod_base = OTHER; note = 2'-O-methyl-adenosine
  modified_base 14: mod_base = OTHER; note = 2'-fluoro-adenosine
  modified_base 15: mod_base = OTHER; note = 2'-O-methyl-uridine
  modified_base 16: mod_base = OTHER; note = 2'-fluoro-adenosine
  modified_base 17: mod_base = OTHER; note = 2'-O-methyl-cytidine
  modified_base 18: mod_base = OTHER; note = 2'-O-methyl-guanosine
  modified_base 19: mod_base = OTHER; note = 2'-O-methyl-adenosine
  modified_base 20: mod_base = OTHER; note = 2'-O-methyl-adenosine with phosphorothioate linkage
  modified_base 21: mod_base = OTHER; note = 2'-O-methyl-guanosine with phosphorothioate linkage
  modified_base 22: mod_base = OTHER; note = 2'-O-methyl-adenosine
tatagtcttcttaatacgaaga

SEQ ID NO: 498 - RNA, 22 nt, synthetic construct
  source 1..22: mol_type = other RNA
  modified_base 1: mod_base = OTHER; note = 2'-O-methyl-uridine with phosphorothioate linkage
  modified_base 2: mod_base = OTHER; note = 2'-fluoro-uridine with phosphorothioate linkage
  modified_base 3: mod_base = OTHER; note = 2'-fluoro-adenosine
  modified_base 4: mod_base = OTHER; note = 2'-O-methyl-uridine
  modified_base 5: mod_base = OTHER; note = 2'-fluoro-adenosine
  modified_base 6: mod_base = OTHER; note = 2'-O-methyl-guanosine
  modified_base 7: mod_base = OTHER; note = 2'-fluoro-uridine
  modified_base 8: mod_base = OTHER; note = 2'-O-methyl-cytidine
  modified_base 9: mod_base = OTHER; note = 2'-O-methyl-uridine
  modified_base 10: mod_base = OTHER; note = 2'-fluoro-uridine
  modified_base 11: mod_base = OTHER; note = 2'-O-methyl-cytidine
  modified_base 12: mod_base = OTHER; note = 2'-O-methyl-uridine
  modified_base 13: mod_base = OTHER; note = 2'-O-methyl-uridine
  modified_base 14: mod_base = OTHER; note = 2'-fluoro-adenosine
  modified_base 15: mod_base = OTHER; note = 2'-O-methyl-adenosine
  modified_base 16: mod_base = OTHER; note = 2'-fluoro-uridine
  modified_base 17: mod_base = OTHER; note = 2'-O-methyl-adenosine
  modified_base 18: mod_base = OTHER; note = 2'-O-methyl-cytidine
  modified_base 19: mod_base = OTHER; note = 2'-O-methyl-guanosine
  modified_base 20: mod_base = OTHER; note = 2'-O-methyl-adenosine with phosphorothioate linkage
  modified_base 21: mod_base = OTHER; note = 2'-O-methyl-adenosine with phosphorothioate linkage
  modified_base 22: mod_base = OTHER; note = 2'-O-methyl-guanosine
ttatagtcttcttaatacgaag

SEQ ID NO: 499 - RNA, 22 nt, synthetic construct
  source 1..22: mol_type = other RNA
  modified_base 1: mod_base = OTHER; note = 2'-O-methyl-uridine with phosphorothioate linkage
  modified_base 2: mod_base = OTHER; note = 2'-fluoro-uridine with phosphorothioate linkage
  modified_base 3: mod_base = OTHER; note = 2'-fluoro-guanosine
  modified_base 4: mod_base = OTHER; note = 2'-O-methyl-adenosine
  modified_base 5: mod_base = OTHER; note = 2'-fluoro-guanosine
  modified_base 6: mod_base = OTHER; note = 2'-O-methyl-adenosine
  modified_base 7: mod_base = OTHER; note = 2'-fluoro-uridine
  modified_base 8: mod_base = OTHER; note = 2'-O-methyl-adenosine
  modified_base 9: mod_base = OTHER; note = 2'-O-methyl-uridine
  modified_base 10: mod_base = OTHER; note = 2'-fluoro-adenosine
  modified_base 11: mod_base = OTHER; note = 2'-O-methyl-guanosine
  modified_base 12: mod_base = OTHER; note = 2'-O-methyl-uridine
  modified_base 13: mod_base = OTHER; note = 2'-O-methyl-cytidine
  modified_base 14: mod_base = OTHER; note = 2'-fluoro-uridine
  modified_base 15: mod_base = OTHER; note = 2'-O-methyl-uridine
  modified_base 16: mod_base = OTHER; note = 2'-fluoro-cytidine
  modified_base 17: mod_base = OTHER; note = 2'-O-methyl-uridine
  modified_base 18: mod_base = OTHER; note = 2'-O-methyl-uridine
  modified_base 19: mod_base = OTHER; note = 2'-O-methyl-adenosine
  modified_base 20: mod_base = OTHER; note = 2'-O-methyl-adenosine with phosphorothioate linkage
  modified_base 21: mod_base = OTHER; note = 2'-O-methyl-uridine with phosphorothioate linkage
  modified_base 22: mod_base = OTHER; note = 2'-O-methyl-adenosine
ttgagatatagtcttcttaata

SEQ ID NO: 500 - RNA, 22 nt, synthetic construct
  source 1..22: mol_type = other RNA
  modified_base 1: mod_base = OTHER; note = 2'-O-methyl-uridine with phosphorothioate linkage
  modified_base 2: mod_base = OTHER; note = 2'-fluoro-uridine with phosphorothioate linkage
  modified_base 3: mod_base = OTHER; note = 2'-fluoro-uridine
  modified_base 4: mod_base = OTHER; note = 2'-O-methyl-guanosine
  modified_base 5: mod_base = OTHER; note = 2'-fluoro-adenosine
  modified_base 6: mod_base = OTHER; note = 2'-O-methyl-guanosine
  modified_base 7: mod_base = OTHER; note = 2'-fluoro-adenosine
  modified_base 8: mod_base = OTHER; note = 2'-O-methyl-uridine
  modified_base 9: mod_base = OTHER; note = 2'-O-methyl-adenosine
  modified_base 10: mod_base = OTHER; note = 2'-fluoro-uridine
  modified_base 11: mod_base = OTHER; note = 2'-O-methyl-adenosine
  modified_base 12: mod_base = OTHER; note = 2'-O-methyl-guanosine
  modified_base 13: mod_base = OTHER; note = 2'-O-methyl-uridine
  modified_base 14: mod_base = OTHER; note = 2'-fluoro-cytidine
  modified_base 15: mod_base = OTHER; note = 2'-O-methyl-uridine
  modified_base 16: mod_base = OTHER; note = 2'-fluoro-uridine
  modified_base 17: mod_base = OTHER; note = 2'-O-methyl-cytidine
  modified_base 18: mod_base = OTHER; note = 2'-O-methyl-uridine
  modified_base 19: mod_base = OTHER; note = 2'-O-methyl-uridine
  modified_base 20: mod_base = OTHER; note = 2'-O-methyl-adenosine with phosphorothioate linkage
  modified_base 21: mod_base = OTHER; note = 2'-O-methyl-adenosine with phosphorothioate linkage
  modified_base 22: mod_base = OTHER; note = 2'-O-methyl-uridine
tttgagatatagtcttcttaat

SEQ ID NO: 501 - RNA, 22 nt, synthetic construct
  source 1..22: mol_type = other RNA
  modified_base 1: mod_base = OTHER; note = 2'-O-methyl-uridine with phosphorothioate linkage
  modified_base 2: mod_base = OTHER; note = 2'-fluoro-guanosine with phosphorothioate linkage
  modified_base 3: mod_base = OTHER; note = 2'-fluoro-uridine
  modified_base 4: mod_base = OTHER; note = 2'-O-methyl-uridine
  modified_base 5: mod_base = OTHER; note = 2'-fluoro-guanosine
  modified_base 6: mod_base = OTHER; note = 2'-O-methyl-adenosine
  modified_base 7: mod_base = OTHER; note = 2'-fluoro-guanosine
  modified_base 8: mod_base = OTHER; note = 2'-O-methyl-adenosine
  modified_base 9: mod_base = OTHER; note = 2'-O-methyl-uridine
  modified_base 10: mod_base = OTHER; note = 2'-fluoro-adenosine
  modified_base 11: mod_base = OTHER; note = 2'-O-methyl-uridine
  modified_base 12: mod_base = OTHER; note = 2'-O-methyl-adenosine
  modified_base 13: mod_base = OTHER; note = 2'-O-methyl-guanosine
  modified_base 14: mod_base = OTHER; note = 2'-fluoro-uridine
  modified_base 15: mod_base = OTHER; note = 2'-O-methyl-cytidine
  modified_base 16: mod_base = OTHER; note = 2'-fluoro-uridine
  modified_base 17: mod_base = OTHER; note = 2'-O-methyl-uridine
  modified_base 18: mod_base = OTHER; note = 2'-O-methyl-cytidine
  modified_base 19: mod_base = OTHER; note = 2'-O-methyl-uridine
  modified_base 20: mod_base = OTHER; note = 2'-O-methyl-uridine with phosphorothioate linkage
  modified_base 21: mod_base = OTHER; note = 2'-O-methyl-adenosine with phosphorothioate linkage
  modified_base 22: mod_base = OTHER; note = 2'-O-methyl-adenosine
tgttgagatatagtcttcttaa

SEQ ID NO: 502 - RNA, 22 nt, synthetic construct
  source 1..22: mol_type = other RNA
  modified_base 1: mod_base = OTHER; note = 2'-O-methyl-uridine with phosphorothioate linkage
  modified_base 2: mod_base = OTHER; note = 2'-fluoro-adenosine with phosphorothioate linkage
  modified_base 3: mod_base = OTHER; note = 2'-fluoro-guanosine
  modified_base 4: mod_base = OTHER; note = 2'-O-methyl-uridine
  modified_base 5: mod_base = OTHER; note = 2'-fluoro-uridine
  modified_base 6: mod_base = OTHER; note = 2'-O-methyl-guanosine
  modified_base 7: mod_base = OTHER; note = 2'-fluoro-adenosine
  modified_base 8: mod_base = OTHER; note = 2'-O-methyl-guanosine
  modified_base 9: mod_base = OTHER; note = 2'-O-methyl-adenosine
  modified_base 10: mod_base = OTHER; note = 2'-fluoro-uridine
  modified_base 11: mod_base = OTHER; note = 2'-O-methyl-adenosine
  modified_base 12: mod_base = OTHER; note = 2'-O-methyl-uridine
  modified_base 13: mod_base = OTHER; note = 2'-O-methyl-adenosine
  modified_base 14: mod_base = OTHER; note = 2'-fluoro-guanosine
  modified_base 15: mod_base = OTHER; note = 2'-O-methyl-uridine
  modified_base 16: mod_base = OTHER; note = 2'-fluoro-cytidine
  modified_base 17: mod_base = OTHER; note = 2'-O-methyl-uridine
  modified_base 18: mod_base = OTHER; note = 2'-O-methyl-uridine
  modified_base 19: mod_base = OTHER; note = 2'-O-methyl-cytidine
  modified_base 20: mod_base = OTHER; note = 2'-O-methyl-uridine with phosphorothioate linkage
  modified_base 21: mod_base = OTHER; note = 2'-O-methyl-uridine with phosphorothioate linkage
  modified_base 22: mod_base = OTHER; note = 2'-O-methyl-adenosine
tagttgagatatagtcttctta

SEQ ID NO: 503 - RNA, 22 nt, synthetic construct
  source 1..22: mol_type = other RNA
  modified_base 1: mod_base = OTHER; note = 2'-O-methyl-uridine with phosphorothioate linkage
  modified_base 2: mod_base = OTHER; note = 2'-fluoro-adenosine with phosphorothioate linkage
  modified_base 3: mod_base = OTHER; note = 2'-fluoro-adenosine
  modified_base 4: mod_base = OTHER; note = 2'-O-methyl-adenosine
  modified_base 5: mod_base = OTHER; note = 2'-fluoro-guanosine
  modified_base 6: mod_base = OTHER; note = 2'-O-methyl-uridine
  modified_base 7: mod_base = OTHER; note = 2'-fluoro-uridine
  modified_base 8: mod_base = OTHER; note = 2'-O-methyl-guanosine
  modified_base 9: mod_base = OTHER; note = 2'-O-methyl-adenosine
  modified_base 10: mod_base = OTHER; note = 2'-fluoro-guanosine
  modified_base 11: mod_base = OTHER; note = 2'-O-methyl-adenosine
  modified_base 12: mod_base = OTHER; note = 2'-O-methyl-uridine
  modified_base 13: mod_base = OTHER; note = 2'-O-methyl-adenosine
  modified_base 14: mod_base = OTHER; note = 2'-fluoro-uridine
  modified_base 15: mod_base = OTHER; note = 2'-O-methyl-adenosine
  modified_base 16: mod_base = OTHER; note = 2'-fluoro-guanosine
  modified_base 17: mod_base = OTHER; note = 2'-O-methyl-uridine
  modified_base 18: mod_base = OTHER; note = 2'-O-methyl-cytidine
  modified_base 19: mod_base = OTHER; note = 2'-O-methyl-uridine
  modified_base 20: mod_base = OTHER; note = 2'-O-methyl-uridine with phosphorothioate linkage
  modified_base 21: mod_base = OTHER; note = 2'-O-methyl-cytidine with phosphorothioate linkage
  modified_base 22: mod_base = OTHER; note = 2'-O-methyl-uridine
taaagttgagatatagtcttct

SEQ ID NO: 504 - RNA, 22 nt, synthetic construct
  source 1..22: mol_type = other RNA
  modified_base 1: mod_base = OTHER; note = 2'-O-methyl-uridine with phosphorothioate linkage
  modified_base 2: mod_base = OTHER; note = 2'-fluoro-cytidine with phosphorothioate linkage
  modified_base 3: mod_base = OTHER; note = 2'-fluoro-adenosine
  modified_base 4: mod_base = OTHER; note = 2'-O-methyl-adenosine
  modified_base 5: mod_base = OTHER; note = 2'-fluoro-adenosine
  modified_base 6: mod_base = OTHER; note = 2'-O-methyl-guanosine
  modified_base 7: mod_base = OTHER; note = 2'-fluoro-uridine
  modified_base 8: mod_base = OTHER; note = 2'-O-methyl-uridine
  modified_base 9: mod_base = OTHER; note = 2'-O-methyl-guanosine
  modified_base 10: mod_base = OTHER; note = 2'-fluoro-adenosine
  modified_base 11: mod_base = OTHER; note = 2'-O-methyl-guanosine
  modified_base 12: mod_base = OTHER; note = 2'-O-methyl-adenosine
  modified_base 13: mod_base = OTHER; note = 2'-O-methyl-uridine
  modified_base 14: mod_base = OTHER; note = 2'-fluoro-adenosine
  modified_base 15: mod_base = OTHER; note = 2'-O-methyl-uridine
  modified_base 16: mod_base = OTHER; note = 2'-fluoro-adenosine
  modified_base 17: mod_base = OTHER; note = 2'-O-methyl-guanosine
  modified_base 18: mod_base = OTHER; note = 2'-O-methyl-uridine
  modified_base 19: mod_base = OTHER; note = 2'-O-methyl-cytidine
  modified_base 20: mod_base = OTHER; note = 2'-O-methyl-uridine with phosphorothioate linkage
  modified_base 21: mod_base = OTHER; note = 2'-O-methyl-uridine with phosphorothioate linkage
  modified_base 22: mod_base = OTHER; note = 2'-O-methyl-cytidine
tcaaagttgagatatagtcttc

SEQ ID NO: 505 - RNA, 22 nt, synthetic construct
  source 1..22: mol_type = other RNA
  modified_base 1: mod_base = OTHER; note = 2'-O-methyl-uridine with phosphorothioate linkage
  modified_base 2: mod_base = OTHER; note = 2'-fluoro-cytidine with phosphorothioate linkage
  modified_base 3: mod_base = OTHER; note = 2'-fluoro-adenosine
  modified_base 4: mod_base = OTHER; note = 2'-O-methyl-cytidine
  modified_base 5: mod_base = OTHER; note = 2'-fluoro-adenosine
  modified_base 6: mod_base = OTHER; note = 2'-O-methyl-adenosine
  modified_base 7: mod_base = OTHER; note = 2'-fluoro-adenosine
  modified_base 8: mod_base = OTHER; note = 2'-O-methyl-guanosine
  modified_base 9: mod_base = OTHER; note = 2'-O-methyl-uridine
  modified_base 10: mod_base = OTHER; note = 2'-fluoro-uridine
  modified_base 11: mod_base = OTHER; note = 2'-O-methyl-guanosine
  modified_base 12: mod_base = OTHER; note = 2'-O-methyl-adenosine
  modified_base 13: mod_base = OTHER; note = 2'-O-methyl-guanosine
  modified_base 14: mod_base = OTHER; note = 2'-fluoro-adenosine
  modified_base 15: mod_base = OTHER; note = 2'-O-methyl-uridine
  modified_base 16: mod_base = OTHER; note = 2'-fluoro-adenosine
  modified_base 17: mod_base = OTHER; note = 2'-O-methyl-uridine
  modified_base 18: mod_base = OTHER; note = 2'-O-methyl-adenosine
  modified_base 19: mod_base = OTHER; note = 2'-O-methyl-guanosine
  modified_base 20: mod_base = OTHER; note = 2'-O-methyl-uridine with phosphorothioate linkage
  modified_base 21: mod_base = OTHER; note = 2'-O-methyl-cytidine with phosphorothioate linkage
  modified_base 22: mod_base = OTHER; note = 2'-O-methyl-uridine
tcacaaagttgagatatagtct

SEQ ID NO: 506 - RNA, 22 nt, synthetic construct
  source 1..22: mol_type = other RNA
  modified_base 1: mod_base = OTHER; note = 2'-O-methyl-uridine with phosphorothioate linkage
  modified_base 2: mod_base = OTHER; note = 2'-fluoro-guanosine with phosphorothioate linkage
  modified_base 3: mod_base = OTHER; note = 2'-fluoro-adenosine
  modified_base 4: mod_base = OTHER; note = 2'-O-methyl-cytidine
  modified_base 5: mod_base = OTHER; note = 2'-fluoro-adenosine
  modified_base 6: mod_base = OTHER; note = 2'-O-methyl-cytidine
  modified_base 7: mod_base = OTHER; note = 2'-fluoro-adenosine
  modified_base 8: mod_base = OTHER; note = 2'-O-methyl-adenosine
  modified_base 9: mod_base = OTHER; note = 2'-O-methyl-adenosine
  modified_base 10: mod_base = OTHER; note = 2'-fluoro-guanosine
  modified_base 11: mod_base = OTHER; note = 2'-O-methyl-uridine
  modified_base 12: mod_base = OTHER; note = 2'-O-methyl-uridine
  modified_base 13: mod_base = OTHER; note = 2'-O-methyl-guanosine
  modified_base 14: mod_base = OTHER; note = 2'-fluoro-adenosine
  modified_base 15: mod_base = OTHER; note = 2'-O-methyl-guanosine
  modified_base 16: mod_base = OTHER; note = 2'-fluoro-adenosine
  modified_base 17: mod_base = OTHER; note = 2'-O-methyl-uridine
  modified_base 18: mod_base = OTHER; note = 2'-O-methyl-adenosine
  modified_base 19: mod_base = OTHER; note = 2'-O-methyl-uridine
  modified_base 20: mod_base = OTHER; note = 2'-O-methyl-adenosine with phosphorothioate linkage
  modified_base 21: mod_base = OTHER; note = 2'-O-methyl-guanosine with phosphorothioate linkage
  modified_base 22: mod_base = OTHER; note = 2'-O-methyl-uridine
tgacacaaagttgagatatagt

SEQ ID NO: 507 - RNA, 22 nt, synthetic construct
  source 1..22: mol_type = other RNA
  modified_base 1: mod_base = OTHER; note = 2'-O-methyl-uridine with phosphorothioate linkage
  modified_base 2: mod_base = OTHER; note = 2'-fluoro-cytidine with phosphorothioate linkage
  modified_base 3: mod_base = OTHER; note = 2'-fluoro-adenosine
  modified_base 4: mod_base = OTHER; note = 2'-O-methyl-guanosine
  modified_base 5: mod_base = OTHER; note = 2'-fluoro-uridine
  modified_base 6: mod_base = OTHER; note = 2'-O-methyl-cytidine
  modified_base 7: mod_base = OTHER; note = 2'-fluoro-uridine
  modified_base 8: mod_base = OTHER; note = 2'-O-methyl-uridine
  modified_base 9: mod_base = OTHER; note = 2'-O-methyl-cytidine
  modified_base 10: mod_base = OTHER; note = 2'-fluoro-uridine
  modified_base 11: mod_base = OTHER; note = 2'-O-methyl-uridine
  modified_base 12: mod_base = OTHER; note = 2'-O-methyl-uridine
  modified_base 13: mod_base = OTHER; note = 2'-O-methyl-guanosine
  modified_base 14: mod_base = OTHER; note = 2'-fluoro-adenosine
  modified_base 15: mod_base = OTHER; note = 2'-O-methyl-cytidine
  modified_base 16: mod_base = OTHER; note = 2'-fluoro-adenosine
  modified_base 17: mod_base = OTHER; note = 2'-O-methyl-cytidine
  modified_base 18: mod_base = OTHER; note = 2'-O-methyl-adenosine
  modified_base 19: mod_base = OTHER; note = 2'-O-methyl-adenosine
  modified_base 20: mod_base = OTHER; note = 2'-O-methyl-adenosine with phosphorothioate linkage
  modified_base 21: mod_base = OTHER; note = 2'-O-methyl-guanosine with phosphorothioate linkage
  modified_base 22: mod_base = OTHER; note = 2'-O-methyl-uridine
tcagtcttctttgacacaaagt

SEQ ID NO: 508 - RNA, 22 nt, synthetic construct
  source 1..22: mol_type = other RNA
  modified_base 1: mod_base = OTHER; note = 2'-O-methyl-uridine with phosphorothioate linkage
  modified_base 2: mod_base = OTHER; note = 2'-fluoro-guanosine with phosphorothioate linkage
  modified_base 3: mod_base = OTHER; note = 2'-fluoro-cytidine
  modified_base 4: mod_base = OTHER; note = 2'-O-methyl-adenosine
  modified_base 5: mod_base = OTHER; note = 2'-fluoro-guanosine
  modified_base 6: mod_base = OTHER; note = 2'-O-methyl-uridine
  modified_base 7: mod_base = OTHER; note = 2'-fluoro-cytidine
  modified_base 8: mod_base = OTHER; note = 2'-O-methyl-uridine
  modified_base 9: mod_base = OTHER; note = 2'-O-methyl-uridine
  modified_base 10: mod_base = OTHER; note = 2'-fluoro-cytidine
  modified_base 11: mod_base = OTHER; note = 2'-O-methyl-uridine
  modified_base 12: mod_base = OTHER; note = 2'-O-methyl-uridine
  modified_base 13: mod_base = OTHER; note = 2'-O-methyl-uridine
  modified_base 14: mod_base = OTHER; note = 2'-fluoro-guanosine
  modified_base 15: mod_base = OTHER; note = 2'-O-methyl-adenosine
  modified_base 16: mod_base = OTHER; note = 2'-fluoro-cytidine
  modified_base 17: mod_base = OTHER; note = 2'-O-methyl-adenosine
  modified_base 18: mod_base = OTHER; note = 2'-O-methyl-cytidine
  modified_base 19: mod_base = OTHER; note = 2'-O-methyl-adenosine
  modified_base 20: mod_base = OTHER; note = 2'-O-methyl-adenosine with phosphorothioate linkage
  modified_base 21: mod_base = OTHER; note = 2'-O-methyl-adenosine with phosphorothioate linkage
  modified_base 22: mod_base = OTHER; note = 2'-O-methyl-guanosine
tgcagtcttctttgacacaaag

SEQ ID NO: 509 - RNA, 22 nt, synthetic construct
  source 1..22: mol_type = other RNA
  modified_base 1: mod_base = OTHER; note = 2'-O-methyl-uridine with phosphorothioate linkage
  modified_base 2: mod_base = OTHER; note = 2'-fluoro-uridine with phosphorothioate linkage
  modified_base 3: mod_base = OTHER; note = 2'-fluoro-uridine
  modified_base 4: mod_base = OTHER; note = 2'-O-methyl-guanosine
  modified_base 5: mod_base = OTHER; note = 2'-fluoro-cytidine
  modified_base 6: mod_base = OTHER; note = 2'-O-methyl-adenosine
  modified_base 7: mod_base = OTHER; note = 2'-fluoro-guanosine
  modified_base 8: mod_base = OTHER; note = 2'-O-methyl-uridine
  modified_base 9: mod_base = OTHER; note = 2'-O-methyl-cytidine
  modified_base 10: mod_base = OTHER; note = 2'-fluoro-uridine
  modified_base 11: mod_base = OTHER; note = 2'-O-methyl-uridine
  modified_base 12: mod_base = OTHER; note = 2'-O-methyl-cytidine
  modified_base 13: mod_base = OTHER; note = 2'-O-methyl-uridine
  modified_base 14: mod_base = OTHER; note = 2'-fluoro-uridine
  modified_base 15: mod_base = OTHER; note = 2'-O-methyl-uridine
  modified_base 16: mod_base = OTHER; note = 2'-fluoro-guanosine
  modified_base 17: mod_base = OTHER; note = 2'-O-methyl-adenosine
  modified_base 18: mod_base = OTHER; note = 2'-O-methyl-cytidine
  modified_base 19: mod_base = OTHER; note = 2'-O-methyl-adenosine
  modified_base 20: mod_base = OTHER; note = 2'-O-methyl-cytidine with phosphorothioate linkage
  modified_base 21: mod_base = OTHER; note = 2'-O-methyl-adenosine with phosphorothioate linkage
  modified_base 22: mod_base = OTHER; note = 2'-O-methyl-adenosine
tttgcagtcttctttgacacaa

SEQ ID NO: 510 - RNA, 22 nt, synthetic construct
  source 1..22: mol_type = other RNA
  modified_base 1: mod_base = OTHER; note = 2'-O-methyl-uridine with phosphorothioate linkage
  modified_base 2: mod_base = OTHER; note = 2'-fluoro-uridine with phosphorothioate linkage
  modified_base 3: mod_base = OTHER; note = 2'-fluoro-uridine
  modified_base 4: mod_base = OTHER; note = 2'-O-methyl-uridine
  modified_base 5: mod_base = OTHER; note = 2'-fluoro-guanosine
  modified_base 6: mod_base = OTHER; note = 2'-O-methyl-cytidine
  modified_base 7: mod_base = OTHER; note = 2'-fluoro-adenosine
  modified_base 8: mod_base = OTHER; note = 2'-O-methyl-guanosine
  modified_base 9: mod_base = OTHER; note = 2'-O-methyl-uridine
  modified_base 10: mod_base = OTHER; note = 2'-fluoro-cytidine
  modified_base 11: mod_base = OTHER; note = 2'-O-methyl-uridine
  modified_base 12: mod_base = OTHER; note = 2'-O-methyl-uridine
  modified_base 13: mod_base = OTHER; note = 2'-O-methyl-cytidine
  modified_base 14: mod_base = OTHER; note = 2'-fluoro-uridine
  modified_base 15: mod_base = OTHER; note = 2'-O-methyl-uridine
  modified_base 16: mod_base = OTHER; note = 2'-fluoro-uridine
  modified_base 17: mod_base = OTHER; note = 2'-O-methyl-guanosine
  modified_base 18: mod_base = OTHER; note = 2'-O-methyl-adenosine
  modified_base 19: mod_base = OTHER; note = 2'-O-methyl-cytidine
  modified_base 20: mod_base = OTHER; note = 2'-O-methyl-adenosine with phosphorothioate linkage
  modified_base 21: mod_base = OTHER; note = 2'-O-methyl-cytidine with phosphorothioate linkage
  modified_base 22: mod_base = OTHER; note = 2'-O-methyl-adenosine
ttttgcagtcttctttgacaca

SEQ ID NO: 511 - RNA, 22 nt, synthetic construct
  source 1..22: mol_type = other RNA
  modified_base 1: mod_base = OTHER; note = 2'-O-methyl-uridine with phosphorothioate linkage
  modified_base 2: mod_base = OTHER; note = 2'-fluoro-adenosine with phosphorothioate linkage
  modified_base 3: mod_base = OTHER; note = 2'-fluoro-uridine
  modified_base 4: mod_base = OTHER; note = 2'-O-methyl-uridine
  modified_base 5: mod_base = OTHER; note = 2'-fluoro-adenosine
  modified_base 6: mod_base = OTHER; note = 2'-O-methyl-guanosine
  modified_base 7: mod_base = OTHER; note = 2'-fluoro-guanosine
  modified_base 8: mod_base = OTHER; note = 2'-O-methyl-cytidine
  modified_base 9: mod_base = OTHER; note = 2'-O-methyl-uridine
  modified_base 10: mod_base = OTHER; note = 2'-fluoro-uridine
  modified_base 11: mod_base = OTHER; note = 2'-O-methyl-uridine
  modified_base 12: mod_base = OTHER; note = 2'-O-methyl-guanosine
  modified_base 13: mod_base = OTHER; note = 2'-O-methyl-cytidine
  modified_base 14: mod_base = OTHER; note = 2'-fluoro-adenosine
  modified_base 15: mod_base = OTHER; note = 2'-O-methyl-guanosine
  modified_base 16: mod_base = OTHER; note = 2'-fluoro-uridine
  modified_base 17: mod_base = OTHER; note = 2'-O-methyl-cytidine
  modified_base 18: mod_base = OTHER; note = 2'-O-methyl-uridine
  modified_base 19: mod_base = OTHER; note = 2'-O-methyl-uridine
  modified_base 20: mod_base = OTHER; note = 2'-O-methyl-cytidine with phosphorothioate linkage
  modified_base 21: mod_base = OTHER; note = 2'-O-methyl-uridine with phosphorothioate linkage
  modified_base 22: mod_base = OTHER; note = 2'-O-methyl-uridine
tattaggctttgcagtcttctt

SEQ ID NO: 512 - RNA, 22 nt, synthetic construct
  source 1..22: mol_type = other RNA
  modified_base 1: mod_base = OTHER; note = 2'-O-methyl-uridine with phosphorothioate linkage
  modified_base 2: mod_base = OTHER; note = 2'-fluoro-cytidine with phosphorothioate linkage
  modified_base 3: mod_base = OTHER; note = 2'-fluoro-adenosine
  modified_base 4: mod_base = OTHER; note = 2'-O-methyl-uridine
  modified_base 5: mod_base = OTHER; note = 2'-fluoro-uridine
  modified_base 6: mod_base = OTHER; note = 2'-O-methyl-adenosine
  modified_base 7: mod_base = OTHER; note = 2'-fluoro-guanosine
  modified_base 8: mod_base = OTHER; note = 2'-O-methyl-guanosine
  modified_base 9: mod_base = OTHER; note = 2'-O-methyl-cytidine
  modified_base 10: mod_base = OTHER; note = 2'-fluoro-uridine
  modified_base 11: mod_base = OTHER; note = 2'-O-methyl-uridine
  modified_base 12: mod_base = OTHER; note = 2'-O-methyl-uridine
  modified_base 13: mod_base = OTHER; note = 2'-O-methyl-guanosine
  modified_base 14: mod_base = OTHER; note = 2'-fluoro-cytidine
  modified_base 15: mod_base = OTHER; note = 2'-O-methyl-adenosine
  modified_base 16: mod_base = OTHER; note = 2'-fluoro-guanosine
  modified_base 17: mod_base = OTHER; note = 2'-O-methyl-uridine
  modified_base 18: mod_base = OTHER; note = 2'-O-methyl-cytidine
  modified_base 19: mod_base = OTHER; note = 2'-O-methyl-uridine
  modified_base 20: mod_base = OTHER; note = 2'-O-methyl-uridine with phosphorothioate linkage
  modified_base 21: mod_base = OTHER; note = 2'-O-methyl-cytidine with phosphorothioate linkage
  modified_base 22: mod_base = OTHER; note = 2'-O-methyl-uridine
tcattaggctttgcagtcttct

SEQ ID NO: 513 - RNA, 22 nt, synthetic construct
  source 1..22: mol_type = other RNA
  modified_base 1: mod_base = OTHER; note = 2'-O-methyl-uridine with phosphorothioate linkage
  modified_base 2: mod_base = OTHER; note = 2'-fluoro-uridine with phosphorothioate linkage
  modified_base 3: mod_base = OTHER; note = 2'-fluoro-cytidine
  modified_base 4: mod_base = OTHER; note = 2'-O-methyl-adenosine
  modified_base 5: mod_base = OTHER; note = 2'-fluoro-uridine
  modified_base 6: mod_base = OTHER; note = 2'-O-methyl-uridine
  modified_base 7: mod_base = OTHER; note = 2'-fluoro-adenosine
  modified_base 8: mod_base = OTHER; note = 2'-O-methyl-guanosine
  modified_base 9: mod_base = OTHER; note = 2'-O-methyl-guanosine
  modified_base 10: mod_base = OTHER; note = 2'-fluoro-cytidine
  modified_base 11: mod_base = OTHER; note = 2'-O-methyl-uridine
  modified_base 12: mod_base = OTHER; note = 2'-O-methyl-uridine
  modified_base 13: mod_base = OTHER; note = 2'-O-methyl-uridine
  modified_base 14: mod_base = OTHER; note = 2'-fluoro-guanosine
  modified_base 15: mod_base = OTHER; note = 2'-O-methyl-cytidine
  modified_base 16: mod_base = OTHER; note = 2'-fluoro-adenosine
  modified_base 17: mod_base = OTHER; note = 2'-O-methyl-guanosine
  modified_base 18: mod_base = OTHER; note = 2'-O-methyl-uridine
  modified_base 19: mod_base = OTHER; note = 2'-O-methyl-cytidine
  modified_base 20: mod_base = OTHER; note = 2'-O-methyl-uridine with phosphorothioate linkage
  modified_base 21: mod_base = OTHER; note = 2'-O-methyl-uridine with phosphorothioate linkage
  modified_base 22: mod_base = OTHER; note = 2'-O-methyl-cytidine
ttcattaggctttgcagtcttc

SEQ ID NO: 514 - RNA, 22 nt, synthetic construct
  source 1..22: mol_type = other RNA
  modified_base 1: mod_base = OTHER; note = 2'-O-methyl-uridine with phosphorothioate linkage
  modified_base 2: mod_base = OTHER; note = 2'-fluoro-cytidine with phosphorothioate linkage
  modified_base 3: mod_base = OTHER; note = 2'-fluoro-adenosine
  modified_base 4: mod_base = OTHER; note = 2'-O-methyl-uridine
  modified_base 5: mod_base = OTHER; note = 2'-fluoro-cytidine
  modified_base 6: mod_base = OTHER; note = 2'-O-methyl-adenosine
  modified_base 7: mod_base = OTHER; note = 2'-fluoro-uridine
  modified_base 8: mod_base = OTHER; note = 2'-O-methyl-uridine
  modified_base 9: mod_base = OTHER; note = 2'-O-methyl-adenosine
  modified_base 10: mod_base = OTHER; note = 2'-fluoro-guanosine
  modified_base 11: mod_base = OTHER; note = 2'-O-methyl-guanosine
  modified_base 12: mod_base = OTHER; note = 2'-O-methyl-cytidine
  modified_base 13: mod_base = OTHER; note = 2'-O-methyl-uridine
  modified_base 14: mod_base = OTHER; note = 2'-fluoro-uridine
  modified_base 15: mod_base = OTHER; note = 2'-O-methyl-uridine
  modified_base 16: mod_base = OTHER; note = 2'-fluoro-guanosine
  modified_base 17: mod_base = OTHER; note = 2'-O-methyl-cytidine
  modified_base 18: mod_base = OTHER; note = 2'-O-methyl-adenosine
  modified_base 19: mod_base = OTHER; note = 2'-O-methyl-guanosine
  modified_base 20: mod_base = OTHER; note = 2'-O-methyl-uridine with phosphorothioate linkage
  modified_base 21: mod_base = OTHER; note = 2'-O-methyl-cytidine with phosphorothioate linkage
  modified_base 22: mod_base = OTHER; note = 2'-O-methyl-uridine
tcatcattaggctttgcagtct

SEQ ID NO: 515 - RNA, 22 nt, synthetic construct
  source 1..22: mol_type = other RNA
  modified_base 1: mod_base = OTHER; note = 2'-O-methyl-uridine with phosphorothioate linkage
  modified_base 2: mod_base = OTHER; note = 2'-fluoro-uridine with phosphorothioate linkage
  modified_base 3: mod_base = OTHER; note = 2'-fluoro-cytidine
  modified_base 4: mod_base = OTHER; note = 2'-O-methyl-adenosine
  modified_base 5: mod_base = OTHER; note = 2'-fluoro-uridine
  modified_base 6: mod_base = OTHER; note = 2'-O-methyl-cytidine
  modified_base 7: mod_base = OTHER; note = 2'-fluoro-adenosine
  modified_base 8: mod_base = OTHER; note = 2'-O-methyl-uridine
  modified_base 9: mod_base = OTHER; note = 2'-O-methyl-uridine
  modified_base 10: mod_base = OTHER; note = 2'-fluoro-adenosine
  modified_base 11: mod_base = OTHER; note = 2'-O-methyl-guanosine
  modified_base 12: mod_base = OTHER; note = 2'-O-methyl-guanosine
  modified_base 13: mod_base = OTHER; note = 2'-O-methyl-cytidine
  modified_base 14: mod_base = OTHER; note = 2'-fluoro-uridine
  modified_base 15: mod_base = OTHER; note = 2'-O-methyl-uridine
  modified_base 16: mod_base = OTHER; note = 2'-fluoro-uridine
  modified_base 17: mod_base = OTHER; note = 2'-O-methyl-guanosine
  modified_base 18: mod_base = OTHER; note = 2'-O-methyl-cytidine
  modified_base 19: mod_base = OTHER; note = 2'-O-methyl-adenosine
  modified_base 20: mod_base = OTHER; note = 2'-O-methyl-guanosine with phosphorothioate linkage
  modified_base 21: mod_base = OTHER; note = 2'-O-methyl-uridine with phosphorothioate linkage
  modified_base 22: mod_base = OTHER; note = 2'-O-methyl-cytidine
ttcatcattaggctttgcagtc

SEQ ID NO: 516 - RNA, 22 nt, synthetic construct
  source 1..22: mol_type = other RNA
  modified_base 1: mod_base = OTHER; note = 2'-O-methyl-uridine with phosphorothioate linkage
  modified_base 2: mod_base = OTHER; note = 2'-fluoro-adenosine with phosphorothioate linkage
  modified_base 3: mod_base = OTHER; note = 2'-fluoro-uridine
  modified_base 4: mod_base = OTHER; note = 2'-O-methyl-cytidine
  modified_base 5: mod_base = OTHER; note = 2'-fluoro-adenosine
  modified_base 6: mod_base = OTHER; note = 2'-O-methyl-uridine
  modified_base 7: mod_base = OTHER; note = 2'-fluoro-cytidine
  modified_base 8: mod_base = OTHER; note = 2'-O-methyl-adenosine
  modified_base 9: mod_base = OTHER; note = 2'-O-methyl-uridine
  modified_base 10: mod_base = OTHER; note = 2'-fluoro-uridine
  modified_base 11: mod_base = OTHER; note = 2'-O-methyl-adenosine
  modified_base 12: mod_base = OTHER; note = 2'-O-methyl-guanosine
  modified_base 13: mod_base = OTHER; note = 2'-O-methyl-guanosine
  modified_base 14: mod_base = OTHER; note = 2'-fluoro-cytidine
  modified_base 15: mod_base = OTHER; note = 2'-O-methyl-uridine
  modified_base 16: mod_base = OTHER; note = 2'-fluoro-uridine
  modified_base 17: mod_base = OTHER; note = 2'-O-methyl-uridine
  modified_base 18: mod_base = OTHER; note = 2'-O-methyl-guanosine
  modified_base 19: mod_base = OTHER; note = 2'-O-methyl-cytidine
  modified_base 20: mod_base = OTHER; note = 2'-O-methyl-adenosine with phosphorothioate linkage
  modified_base 21: mod_base = OTHER; note = 2'-O-methyl-guanosine with phosphorothioate linkage
  modified_base 22: mod_base = OTHER; note = 2'-O-methyl-uridine
tatcatcattaggctttgcagt

SEQ ID NO: 517 - RNA, 22 nt, synthetic construct
  source 1..22: mol_type = other RNA
  modified_base 1: mod_base = OTHER; note = 2'-O-methyl-uridine with phosphorothioate linkage
  modified_base 2: mod_base = OTHER; note = 2'-fluoro-uridine with phosphorothioate linkage
  modified_base 3: mod_base = OTHER; note = 2'-fluoro-uridine
  modified_base 4: mod_base = OTHER; note = 2'-O-methyl-adenosine
  modified_base 5: mod_base = OTHER; note = 2'-fluoro-adenosine
  modified_base 6: mod_base = OTHER; note = 2'-O-methyl-adenosine
  modified_base 7: mod_base = OTHER; note = 2'-fluoro-adenosine
  modified_base 8: mod_base = OTHER; note = 2'-O-methyl-adenosine
  modified_base 9: mod_base = OTHER; note = 2'-O-methyl-guanosine
  modified_base 10: mod_base = OTHER; note = 2'-fluoro-uridine
  modified_base 11: mod_base = OTHER; note = 2'-O-methyl-cytidine
  modified_base 12: mod_base = OTHER; note = 2'-O-methyl-cytidine
  modified_base 13: mod_base = OTHER; note = 2'-O-methyl-uridine
  modified_base 14: mod_base = OTHER; note = 2'-fluoro-guanosine
  modified_base 15: mod_base = OTHER; note = 2'-O-methyl-cytidine
  modified_base 16: mod_base = OTHER; note = 2'-fluoro-uridine
  modified_base 17: mod_base = OTHER; note = 2'-O-methyl-adenosine
  modified_base 18: mod_base = OTHER; note = 2'-O-methyl-adenosine
  modified_base 19: mod_base = OTHER; note = 2'-O-methyl-cytidine
  modified_base 20: mod_base = OTHER; note = 2'-O-methyl-uridine with phosphorothioate linkage
  modified_base 21: mod_base = OTHER; note = 2'-O-methyl-uridine with phosphorothioate linkage
  modified_base 22: mod_base = OTHER; note = 2'-O-methyl-adenosine
tttaaaaagtcctgctaactta

SEQ ID NO: 518 - RNA, 22 nt, synthetic construct
  source 1..22: mol_type = other RNA
  modified_base 1: mod_base = OTHER; note = 2'-O-methyl-uridine with phosphorothioate linkage
  modified_base 2: mod_base = OTHER; note = 2'-fluoro-guanosine with phosphorothioate linkage
  modified_base 3: mod_base = OTHER; note = 2'-fluoro-uridine
  modified_base 4: mod_base = OTHER; note = 2'-O-methyl-adenosine
  modified_base 5: mod_base = OTHER; note = 2'-fluoro-cytidine
  modified_base 6: mod_base = OTHER; note = 2'-O-methyl-adenosine
  modified_base 7: mod_base = OTHER; note = 2'-fluoro-adenosine
  modified_base 8: mod_base = OTHER; note = 2'-O-methyl-adenosine
  modified_base 9: mod_base = OTHER; note = 2'-O-methyl-guanosine
  modified_base 10: mod_base = OTHER; note = 2'-fluoro-guanosine
  modified_base 11: mod_base = OTHER; note = 2'-O-methyl-adenosine
  modified_base 12: mod_base = OTHER; note = 2'-O-methyl-adenosine
  modified_base 13: mod_base = OTHER; note = 2'-O-methyl-adenosine
  modified_base 14: mod_base = OTHER; note = 2'-fluoro-uridine
  modified_base 15: mod_base = OTHER; note = 2'-O-methyl-adenosine
  modified_base 16: mod_base = OTHER; note = 2'-fluoro-guanosine
  modified_base 17: mod_base = OTHER; note = 2'-O-methyl-guanosine
  modified_base 18: mod_base = OTHER; note = 2'-O-methyl-guanosine
  modified_base 19: mod_base = OTHER; note = 2'-O-methyl-adenosine
  modified_base 20: mod_base = OTHER; note = 2'-O-methyl-cytidine with phosphorothioate linkage
  modified_base 21: mod_base = OTHER; note = 2'-O-methyl-cytidine with phosphorothioate linkage
  modified_base 22: mod_base = OTHER; note = 2'-O-methyl-uridine
tgtacaaaggaaatagggacct

SEQ ID NO: 519 - RNA, 22 nt, synthetic construct
  source 1..22: mol_type = other RNA
  modified_base 1: mod_base = OTHER; note = 2'-O-methyl-uridine with phosphorothioate linkage
  modified_base 2: mod_base = OTHER; note = 2'-fluoro-uridine with phosphorothioate linkage
  modified_base 3: mod_base = OTHER; note = 2'-fluoro-guanosine
  modified_base 4: mod_base = OTHER; note = 2'-O-methyl-uridine
  modified_base 5: mod_base = OTHER; note = 2'-fluoro-adenosine
  modified_base 6: mod_base = OTHER; note = 2'-O-methyl-cytidine
  modified_base 7: mod_base = OTHER; note = 2'-fluoro-adenosine
  modified_base 8: mod_base = OTHER; note = 2'-O-methyl-adenosine
  modified_base 9: mod_base = OTHER; note = 2'-O-methyl-adenosine
  modified_base 10: mod_base = OTHER; note = 2'-fluoro-guanosine
  modified_base 11: mod_base = OTHER; note = 2'-O-methyl-guanosine
  modified_base 12: mod_base = OTHER; note = 2'-O-methyl-adenosine
  modified_base 13: mod_base = OTHER; note = 2'-O-methyl-adenosine
  modified_base 14: mod_base = OTHER; note = 2'-fluoro-adenosine
  modified_base 15: mod_base = OTHER; note = 2'-O-methyl-uridine
  modified_base 16: mod_base = OTHER; note = 2'-fluoro-adenosine
  modified_base 17: mod_base = OTHER; note = 2'-O-methyl-guanosine
  modified_base 18: mod_base = OTHER; note = 2'-O-methyl-guanosine
  modified_base 19: mod_base = OTHER; note = 2'-O-methyl-guanosine
  modified_base 20: mod_base = OTHER; note = 2'-O-methyl-adenosine with phosphorothioate linkage
  modified_base 21: mod_base = OTHER; note = 2'-O-methyl-cytidine with phosphorothioate linkage
  modified_base 22: mod_base = OTHER; note = 2'-O-methyl-cytidine
ttgtacaaaggaaatagggacc

SEQ ID NO: 520 - RNA, 22 nt, synthetic construct
  source 1..22: mol_type = other RNA
  modified_base 1: mod_base = OTHER; note = 2'-O-methyl-uridine with phosphorothioate linkage
  modified_base 2: mod_base = OTHER; note = 2'-fluoro-adenosine with phosphorothioate linkage
  modified_base 3: mod_base = OTHER; note = 2'-fluoro-uridine
  modified_base 4: mod_base = OTHER; note = 2'-O-methyl-guanosine
  modified_base 5: mod_base = OTHER; note = 2'-fluoro-uridine
  modified_base 6: mod_base = OTHER; note = 2'-O-methyl-adenosine
  modified_base 7: mod_base = OTHER; note = 2'-fluoro-cytidine
  modified_base 8: mod_base = OTHER; note = 2'-O-methyl-adenosine
  modified_base 9: mod_base = OTHER; note = 2'-O-methyl-adenosine
  modified_base 10: mod_base = OTHER; note = 2'-fluoro-adenosine
  modified_base 11: mod_base = OTHER; note = 2'-O-methyl-guanosine
  modified_base 12: mod_base = OTHER; note = 2'-O-methyl-guanosine
  modified_base 13: mod_base = OTHER; note = 2'-O-methyl-adenosine
  modified_base 14: mod_base = OTHER; note = 2'-fluoro-adenosine
  modified_base 15: mod_base = OTHER; note = 2'-O-methyl-adenosine
  modified_base 16: mod_base = OTHER; note = 2'-fluoro-uridine
  modified_base 17: mod_base = OTHER; note = 2'-O-methyl-adenosine
  modified_base 18: mod_base = OTHER; note = 2'-O-methyl-guanosine
  modified_base 19: mod_base = OTHER; note = 2'-O-methyl-guanosine
  modified_base 20: mod_base = OTHER; note = 2'-O-methyl-guanosine with phosphorothioate linkage
  modified_base 21: mod_base = OTHER; note = 2'-O-methyl-adenosine with phosphorothioate linkage
  modified_base 22: mod_base = OTHER; note = 2'-O-methyl-cytidine
tatgtacaaaggaaatagggac

SEQ ID NO: 521 - RNA, 22 nt, synthetic construct
  source 1..22: mol_type = other RNA
  modified_base 1: mod_base = OTHER; note = 2'-O-methyl-uridine with phosphorothioate linkage
  modified_base 2: mod_base = OTHER; note = 2'-fluoro-adenosine with phosphorothioate linkage
  modified_base 3: mod_base = OTHER; note = 2'-fluoro-guanosine
  modified_base 4: mod_base = OTHER; note = 2'-O-methyl-uridine
  modified_base 5: mod_base = OTHER; note = 2'-fluoro-uridine
  modified_base 6: mod_base = OTHER; note = 2'-O-methyl-adenosine
  modified_base 7: mod_base = OTHER; note = 2'-fluoro-adenosine
  modified_base 8: mod_base = OTHER; note = 2'-O-methyl-adenosine
  modified_base 9: mod_base = OTHER; note = 2'-O-methyl-uridine
  modified_base 10: mod_base = OTHER; note = 2'-fluoro-adenosine
  modified_base 11: mod_base = OTHER; note = 2'-O-methyl-uridine
  modified_base 12: mod_base = OTHER; note = 2'-O-methyl-guanosine
  modified_base 13: mod_base = OTHER; note = 2'-O-methyl-guanosine
  modified_base 14: mod_base = OTHER; note = 2'-fluoro-guanosine
  modified_base 15: mod_base = OTHER; note = 2'-O-methyl-adenosine
  modified_base 16: mod_base = OTHER; note = 2'-fluoro-uridine
  modified_base 17: mod_base = OTHER; note = 2'-O-methyl-adenosine
  modified_base 18: mod_base = OTHER; note = 2'-O-methyl-guanosine
  modified_base 19: mod_base = OTHER; note = 2'-O-methyl-uridine
  modified_base 20: mod_base = OTHER; note = 2'-O-methyl-adenosine with phosphorothioate linkage
  modified_base 21: mod_base = OTHER; note = 2'-O-methyl-adenosine with phosphorothioate linkage
  modified_base 22: mod_base = OTHER; note = 2'-O-methyl-adenosine
tagttaaatatgggatagtaaa

SEQ ID NO: 522 - RNA, 22 nt, synthetic construct
  source 1..22: mol_type = other RNA
  modified_base 1: mod_base = OTHER; note = 2'-O-methyl-uridine with phosphorothioate linkage
  modified_base 2: mod_base = OTHER; note = 2'-fluoro-cytidine with phosphorothioate linkage
  modified_base 3: mod_base = OTHER; note = 2'-fluoro-adenosine
  modified_base 4: mod_base = OTHER; note = 2'-O-methyl-guanosine
  modified_base 5: mod_base = OTHER; note = 2'-fluoro-uridine
  modified_base 6: mod_base = OTHER; note = 2'-O-methyl-uridine
  modified_base 7: mod_base = OTHER; note = 2'-fluoro-adenosine
  modified_base 8: mod_base = OTHER; note = 2'-O-methyl-adenosine
  modified_base 9: mod_base = OTHER; note = 2'-O-methyl-adenosine
  modified_base 10: mod_base = OTHER; note = 2'-fluoro-uridine
  modified_base 11: mod_base = OTHER; note = 2'-O-methyl-adenosine
  modified_base 12: mod_base = OTHER; note = 2'-O-methyl-uridine
  modified_base 13: mod_base = OTHER; note = 2'-O-methyl-guanosine
  modified_base 14: mod_base = OTHER; note = 2'-fluoro-guanosine
  modified_base 15: mod_base = OTHER; note = 2'-O-methyl-guanosine
  modified_base 16: mod_base = OTHER; note = 2'-fluoro-adenosine
  modified_base 17: mod_base = OTHER; note = 2'-O-methyl-uridine
  modified_base 18: mod_base = OTHER; note = 2'-O-methyl-adenosine
  modified_base 19: mod_base = OTHER; note = 2'-O-methyl-guanosine
  modified_base 20: mod_base = OTHER; note = 2'-O-methyl-uridine with phosphorothioate linkage
  modified_base 21: mod_base = OTHER; note = 2'-O-methyl-adenosine with phosphorothioate linkage
  modified_base 22: mod_base = OTHER; note = 2'-O-methyl-adenosine
tcagttaaatatgggatagtaa

SEQ ID NO: 523 - RNA, 22 nt, synthetic construct
  source 1..22: mol_type = other RNA
  modified_base 1: mod_base = OTHER; note = 2'-O-methyl-uridine with phosphorothioate linkage
  modified_base 2: mod_base = OTHER; note = 2'-fluoro-adenosine with phosphorothioate linkage
  modified_base 3: mod_base = OTHER; note = 2'-fluoro-adenosine
  modified_base 4: mod_base = OTHER; note = 2'-O-methyl-cytidine
  modified_base 5: mod_base = OTHER; note = 2'-fluoro-adenosine
  modified_base 6: mod_base = OTHER; note = 2'-O-methyl-guanosine
  modified_base 7: mod_base = OTHER; note = 2'-fluoro-uridine
  modified_base 8: mod_base = OTHER; note = 2'-O-methyl-uridine
  modified_base 9: mod_base = OTHER; note = 2'-O-methyl-adenosine
  modified_base 10: mod_base = OTHER; note = 2'-fluoro-adenosine
  modified_base 11: mod_base = OTHER; note = 2'-O-methyl-adenosine
  modified_base 12: mod_base = OTHER; note = 2'-O-methyl-uridine
  modified_base 13: mod_base = OTHER; note = 2'-O-methyl-adenosine
  modified_base 14: mod_base = OTHER; note = 2'-fluoro-uridine
  modified_base 15: mod_base = OTHER; note = 2'-O-methyl-guanosine
  modified_base 16: mod_base = OTHER; note = 2'-fluoro-guanosine
  modified_base 17: mod_base = OTHER; note = 2'-O-methyl-guanosine
  modified_base 18: mod_base = OTHER; note = 2'-O-methyl-adenosine
  modified_base 19: mod_base = OTHER; note = 2'-O-methyl-uridine
  modified_base 20: mod_base = OTHER; note = 2'-O-methyl-adenosine with phosphorothioate linkage
  modified_base 21: mod_base = OTHER; note = 2'-O-methyl-guanosine with phosphorothioate linkage
  modified_base 22: mod_base = OTHER; note = 2'-O-methyl-uridine
taacagttaaatatgggatagt

SEQ ID NO: 524 - RNA, 22 nt, synthetic construct
  source 1..22: mol_type = other RNA
  modified_base 1: mod_base = OTHER; note = 2'-O-methyl-uridine with phosphorothioate linkage
  modified_base 2: mod_base = OTHER; note = 2'-fluoro-guanosine with phosphorothioate linkage
  modified_base 3: mod_base = OTHER; note = 2'-fluoro-adenosine
  modified_base 4: mod_base = OTHER; note = 2'-O-methyl-adenosine
  modified_base 5: mod_base = OTHER; note = 2'-fluoro-cytidine
  modified_base 6: mod_base = OTHER; note = 2'-O-methyl-adenosine
  modified_base 7: mod_base = OTHER; note = 2'-fluoro-guanosine
  modified_base 8: mod_base = OTHER; note = 2'-O-methyl-uridine
  modified_base 9: mod_base = OTHER; note = 2'-O-methyl-uridine
  modified_base 10: mod_base = OTHER; note = 2'-fluoro-adenosine
  modified_base 11: mod_base = OTHER; note = 2'-O-methyl-adenosine
  modified_base 12: mod_base = OTHER; note = 2'-O-methyl-adenosine
  modified_base 13: mod_base = OTHER; note = 2'-O-methyl-uridine
  modified_base 14: mod_base = OTHER; note = 2'-fluoro-adenosine
  modified_base 15: mod_base = OTHER; note = 2'-O-methyl-uridine
  modified_base 16: mod_base = OTHER; note = 2'-fluoro-guanosine
  modified_base 17: mod_base = OTHER; note = 2'-O-methyl-guanosine
  modified_base 18: mod_base = OTHER; note = 2'-O-methyl-guanosine
  modified_base 19: mod_base = OTHER; note = 2'-O-methyl-adenosine
  modified_base 20: mod_base = OTHER; note = 2'-O-methyl-uridine with phosphorothioate linkage
  modified_base 21: mod_base = OTHER; note = 2'-O-methyl-adenosine with phosphorothioate linkage
  modified_base 22: mod_base = OTHER; note = 2'-O-methyl-guanosine
tgaacagttaaatatgggatag

SEQ ID NO: 525 - RNA, 22 nt, synthetic construct
  source 1..22: mol_type = other RNA
  modified_base 1: mod_base = OTHER; note = 2'-O-methyl-uridine with phosphorothioate linkage
  modified_base 2: mod_base = OTHER; note = 2'-fluoro-cytidine with phosphorothioate linkage
  modified_base 3: mod_base = OTHER; note = 2'-fluoro-cytidine
  modified_base 4: mod_base = OTHER; note = 2'-O-methyl-adenosine
  modified_base 5: mod_base = OTHER; note = 2'-fluoro-adenosine
  modified_base 6: mod_base = OTHER; note = 2'-O-methyl-adenosine
  modified_base 7: mod_base = OTHER; note = 2'-fluoro-uridine
  modified_base 8: mod_base = OTHER; note = 2'-O-methyl-adenosine
  modified_base 9: mod_base = OTHER; note = 2'-O-methyl-adenosine
  modified_base 10: mod_base = OTHER; note = 2'-fluoro-adenosine
  modified_base 11: mod_base = OTHER; note = 2'-O-methyl-guanosine
  modified_base 12: mod_base = OTHER; note = 2'-O-methyl-cytidine
  modified_base 13: mod_base = OTHER; note = 2'-O-methyl-uridine
  modified_base 14: mod_base = OTHER; note = 2'-fluoro-adenosine
  modified_base 15: mod_base = OTHER; note = 2'-O-methyl-cytidine
  modified_base 16: mod_base = OTHER; note = 2'-fluoro-uridine
  modified_base 17: mod_base = OTHER; note = 2'-O-methyl-uridine
  modified_base 18: mod_base = OTHER; note = 2'-O-methyl-uridine
  modified_base 19: mod_base = OTHER; note = 2'-O-methyl-cytidine
  modified_base 20: mod_base = OTHER; note = 2'-O-methyl-uridine with phosphorothioate linkage
  modified_base 21: mod_base = OTHER; note = 2'-O-methyl-adenosine with phosphorothioate linkage
  modified_base 22: mod_base = OTHER; note = 2'-O-methyl-adenosine
tccaaataaagctactttctaa

SEQ ID NO: 526 - RNA, 22 nt, synthetic construct
  source 1..22: mol_type = other RNA
  modified_base 1: mod_base = OTHER; note = 2'-O-methyl-uridine with phosphorothioate linkage
  modified_base 2: mod_base = OTHER; note = 2'-fluoro-adenosine with phosphorothioate linkage
  modified_base 3: mod_base = OTHER; note = 2'-fluoro-uridine
  modified_base 4: mod_base = OTHER; note = 2'-O-methyl-cytidine
  modified_base 5: mod_base = OTHER; note = 2'-fluoro-cytidine
  modified_base 6: mod_base = OTHER; note = 2'-O-methyl-adenosine
  modified_base 7: mod_base = OTHER; note = 2'-fluoro-adenosine
  modified_base 8: mod_base = OTHER; note = 2'-O-methyl-adenosine
  modified_base 9: mod_base = OTHER; note = 2'-O-methyl-uridine
  modified_base 10: mod_base = OTHER; note = 2'-fluoro-adenosine
  modified_base 11: mod_base = OTHER; note = 2'-O-methyl-adenosine
  modified_base 12: mod_base = OTHER; note = 2'-O-methyl-adenosine
  modified_base 13: mod_base = OTHER; note = 2'-O-methyl-guanosine
  modified_base 14: mod_base = OTHER; note = 2'-fluoro-cytidine
  modified_base 15: mod_base = OTHER; note = 2'-O-methyl-uridine
  modified_base 16: mod_base = OTHER; note = 2'-fluoro-adenosine
  modified_base 17: mod_base = OTHER; note = 2'-O-methyl-cytidine
  modified_base 18: mod_base = OTHER; note = 2'-O-methyl-uridine
  modified_base 19: mod_base = OTHER; note = 2'-O-methyl-uridine
  modified_base 20: mod_base = OTHER; note = 2'-O-methyl-uridine with phosphorothioate linkage
  modified_base 21: mod_base = OTHER; note = 2'-O-methyl-cytidine with phosphorothioate linkage
  modified_base 22: mod_base = OTHER; note = 2'-O-methyl-uridine
tatccaaataaagctactttct

SEQ ID NO: 527 - RNA, 22 nt, synthetic construct
  source 1..22: mol_type = other RNA
  modified_base 1: mod_base = OTHER; note = 2'-O-methyl-uridine with phosphorothioate linkage
  modified_base 2: mod_base = OTHER; note = 2'-fluoro-uridine with phosphorothioate linkage
  modified_base 3: mod_base = OTHER; note = 2'-fluoro-adenosine
  modified_base 4: mod_base = OTHER; note = 2'-O-methyl-uridine
  modified_base 5: mod_base = OTHER; note = 2'-fluoro-cytidine
  modified_base 6: mod_base = OTHER; note = 2'-O-methyl-cytidine
  modified_base 7: mod_base = OTHER; note = 2'-fluoro-adenosine
  modified_base 8: mod_base = OTHER; note = 2'-O-methyl-adenosine
  modified_base 9: mod_base = OTHER; note = 2'-O-methyl-adenosine
  modified_base 10: mod_base = OTHER; note = 2'-fluoro-uridine
  modified_base 11: mod_base = OTHER; note = 2'-O-methyl-adenosine
  modified_base 12: mod_base = OTHER; note = 2'-O-methyl-adenosine
  modified_base 13: mod_base = OTHER; note = 2'-O-methyl-adenosine
  modified_base 14: mod_base = OTHER; note = 2'-fluoro-guanosine
  modified_base 15: mod_base = OTHER; note = 2'-O-methyl-cytidine
  modified_base 16: mod_base = OTHER; note = 2'-fluoro-uridine
  modified_base 17: mod_base = OTHER; note = 2'-O-methyl-adenosine
  modified_base 18: mod_base = OTHER; note = 2'-O-methyl-cytidine
  modified_base 19: mod_base = OTHER; note = 2'-O-methyl-uridine
  modified_base 20: mod_base = OTHER; note = 2'-O-methyl-uridine with phosphorothioate linkage
  modified_base 21: mod_base = OTHER; note = 2'-O-methyl-uridine with phosphorothioate linkage
  modified_base 22: mod_base = OTHER; note = 2'-O-methyl-cytidine
ttatccaaataaagctactttc

SEQ ID NO: 528 - RNA, 22 nt, synthetic construct
  source 1..22: mol_type = other RNA
  modified_base 1: mod_base = OTHER; note = 2'-O-methyl-uridine with phosphorothioate linkage
  modified_base 2: mod_base = OTHER; note = 2'-fluoro-adenosine with phosphorothioate linkage
  modified_base 3: mod_base = OTHER; note = 2'-fluoro-uridine
  modified_base 4: mod_base = OTHER; note = 2'-O-methyl-adenosine
  modified_base 5: mod_base = OTHER; note = 2'-fluoro-uridine
  modified_base 6: mod_base = OTHER; note = 2'-O-methyl-cytidine
  modified_base 7: mod_base = OTHER; note = 2'-fluoro-cytidine
  modified_base 8: mod_base = OTHER; note = 2'-O-methyl-adenosine
  modified_base 9: mod_base = OTHER; note = 2'-O-methyl-adenosine
  modified_base 10: mod_base = OTHER; note = 2'-fluoro-adenosine
  modified_base 11: mod_base = OTHER; note = 2'-O-methyl-uridine
  modified_base 12: mod_base = OTHER; note = 2'-O-methyl-adenosine
  modified_base 13: mod_base = OTHER; note = 2'-O-methyl-adenosine
  modified_base 14: mod_base = OTHER; note = 2'-fluoro-adenosine
  modified_base 15: mod_base = OTHER; note = 2'-O-methyl-guanosine
  modified_base 16: mod_base = OTHER; note = 2'-fluoro-cytidine
  modified_base 17: mod_base = OTHER; note = 2'-O-methyl-uridine
  modified_base 18: mod_base = OTHER; note = 2'-O-methyl-adenosine
  modified_base 19: mod_base = OTHER; note = 2'-O-methyl-cytidine
  modified_base 20: mod_base = OTHER; note = 2'-O-methyl-uridine with phosphorothioate linkage
  modified_base 21: mod_base = OTHER; note = 2'-O-methyl-uridine with phosphorothioate linkage
  modified_base 22: mod_base = OTHER; note = 2'-O-methyl-uridine
tatatccaaataaagctacttt

SEQ ID NO: 529 - RNA, 22 nt, synthetic construct
  source 1..22: mol_type = other RNA
  modified_base 1: mod_base = OTHER; note = 2'-O-methyl-uridine with phosphorothioate linkage
  modified_base 2: mod_base = OTHER; note = 2'-fluoro-adenosine with phosphorothioate linkage
  modified_base 3: mod_base = OTHER; note = 2'-fluoro-cytidine
  modified_base 4: mod_base = OTHER; note = 2'-O-methyl-adenosine
  modified_base 5: mod_base = OTHER; note = 2'-fluoro-uridine
  modified_base 6: mod_base = OTHER; note = 2'-O-methyl-adenosine
  modified_base 7: mod_base = OTHER; note = 2'-fluoro-cytidine
  modified_base 8: mod_base = OTHER; note = 2'-O-methyl-guanosine
  modified_base 9: mod_base = OTHER; note = 2'-O-methyl-guanosine
  modified_base 10: mod_base = OTHER; note = 2'-fluoro-adenosine
  modified_base 11: mod_base = OTHER; note = 2'-O-methyl-uridine
  modified_base 12: mod_base = OTHER; note = 2'-O-methyl-uridine
  modified_base 13: mod_base = OTHER; note = 2'-O-methyl-uridine
  modified_base 14: mod_base = OTHER; note = 2'-fluoro-cytidine
  modified_base 15: mod_base = OTHER; note = 2'-O-methyl-uridine
  modified_base 16: mod_base = OTHER; note = 2'-fluoro-uridine
  modified_base 17: mod_base = OTHER; note = 2'-O-methyl-cytidine
  modified_base 18: mod_base = OTHER; note = 2'-O-methyl-adenosine
  modified_base 19: mod_base = OTHER; note = 2'-O-methyl-guanosine
  modified_base 20: mod_base = OTHER; note = 2'-O-methyl-adenosine with phosphorothioate linkage
  modified_base 21: mod_base = OTHER; note = 2'-O-methyl-guanosine with phosphorothioate linkage
  modified_base 22: mod_base = OTHER; note = 2'-O-methyl-uridine
tacatacggatttcttcagagt

SEQ ID NO: 530 - RNA, 22 nt, synthetic construct
  source 1..22: mol_type = other RNA
  modified_base 1: mod_base = OTHER; note = 2'-O-methyl-uridine with phosphorothioate linkage
  modified_base 2: mod_base = OTHER; note = 2'-fluoro-uridine with phosphorothioate linkage
  modified_base 3: mod_base = OTHER; note = 2'-fluoro-adenosine
  modified_base 4: mod_base = OTHER; note = 2'-O-methyl-adenosine
  modified_base 5: mod_base = OTHER; note = 2'-fluoro-cytidine
  modified_base 6: mod_base = OTHER; note = 2'-O-methyl-adenosine
  modified_base 7: mod_base = OTHER; note = 2'-fluoro-uridine
  modified_base 8: mod_base = OTHER; note = 2'-O-methyl-adenosine
  modified_base 9: mod_base = OTHER; note = 2'-O-methyl-cytidine
  modified_base 10: mod_base = OTHER; note = 2'-fluoro-guanosine
  modified_base 11: mod_base = OTHER; note = 2'-O-methyl-guanosine
  modified_base 12: mod_base = OTHER; note = 2'-O-methyl-adenosine
  modified_base 13: mod_base = OTHER; note = 2'-O-methyl-uridine
  modified_base 14: mod_base = OTHER; note = 2'-fluoro-uridine
  modified_base 15: mod_base = OTHER; note = 2'-O-methyl-uridine
  modified_base 16: mod_base = OTHER; note = 2'-fluoro-cytidine
  modified_base 17: mod_base = OTHER; note = 2'-O-methyl-uridine
  modified_base 18: mod_base = OTHER; note = 2'-O-methyl-uridine
  modified_base 19: mod_base = OTHER; note = 2'-O-methyl-cytidine
  modified_base 20: mod_base = OTHER; note = 2'-O-methyl-adenosine with phosphorothioate linkage
  modified_base 21: mod_base = OTHER; note = 2'-O-methyl-guanosine with phosphorothioate linkage
  modified_base 22: mod_base = OTHER; note = 2'-O-methyl-adenosine
ttaacatacggatttcttcaga

SEQ ID NO: 531 - RNA, 22 nt, synthetic construct
  source 1..22: mol_type = other RNA
  modified_base 1: mod_base = OTHER; note = 2'-O-methyl-uridine with phosphorothioate linkage
  modified_base 2: mod_base = OTHER; note = 2'-fluoro-cytidine with phosphorothioate linkage
  modified_base 3: mod_base = OTHER; note = 2'-fluoro-adenosine
  modified_base 4: mod_base = OTHER; note = 2'-O-methyl-uridine
  modified_base 5: mod_base = OTHER; note = 2'-fluoro-uridine
  modified_base 6: mod_base = OTHER; note = 2'-O-methyl-uridine
  modified_base 7: mod_base = OTHER; note = 2'-fluoro-guanosine
  modified_base 8: mod_base = OTHER; note = 2'-O-methyl-adenosine
  modified_base 9: mod_base = OTHER; note = 2'-O-methyl-cytidine
  modified_base 10: mod_base = OTHER; note = 2'-fluoro-adenosine
  modified_base 11: mod_base = OTHER; note = 2'-O-methyl-guanosine
  modified_base 12: mod_base = OTHER; note = 2'-O-methyl-cytidine
  modified_base 13: mod_base = OTHER; note = 2'-O-methyl-adenosine
  modified_base 14: mod_base = OTHER; note = 2'-fluoro-uridine
  modified_base 15: mod_base = OTHER; note = 2'-O-methyl-adenosine
  modified_base 16: mod_base = OTHER; note = 2'-fluoro-adenosine
  modified_base 17: mod_base = OTHER; note = 2'-O-methyl-guanosine
  modified_base 18: mod_base = OTHER; note = 2'-O-methyl-uridine
  modified_base 19: mod_base = OTHER; note = 2'-O-methyl-adenosine
  modified_base 20: mod_base = OTHER; note = 2'-O-methyl-uridine with phosphorothioate linkage
  modified_base 21: mod_base = OTHER; note = 2'-O-methyl-adenosine with phosphorothioate linkage
  modified_base 22: mod_base = OTHER; note = 2'-O-methyl-uridine
tcatttgacagcataagtatat

SEQ ID NO: 532 - RNA, 22 nt, synthetic construct
  source 1..22: mol_type = other RNA
  modified_base 1: mod_base = OTHER; note = 2'-O-methyl-uridine with phosphorothioate linkage
  modified_base 2: mod_base = OTHER; note = 2'-fluoro-adenosine with phosphorothioate linkage
  modified_base 3: mod_base = OTHER; note = 2'-fluoro-cytidine
  modified_base 4: mod_base = OTHER; note = 2'-O-methyl-adenosine
  modified_base 5: mod_base = OTHER; note = 2'-fluoro-uridine
  modified_base 6: mod_base = OTHER; note = 2'-O-methyl-uridine
  modified_base 7: mod_base = OTHER; note = 2'-fluoro-uridine
  modified_base 8: mod_base = OTHER; note = 2'-O-methyl-guanosine
  modified_base 9: mod_base = OTHER; note = 2'-O-methyl-adenosine
  modified_base 10: mod_base = OTHER; note = 2'-fluoro-cytidine
  modified_base 11: mod_base = OTHER; note = 2'-O-methyl-adenosine
  modified_base 12: mod_base = OTHER; note = 2'-O-methyl-guanosine
  modified_base 13: mod_base = OTHER; note = 2'-O-methyl-cytidine
  modified_base 14: mod_base = OTHER; note = 2'-fluoro-adenosine
  modified_base 15: mod_base = OTHER; note = 2'-O-methyl-uridine
  modified_base 16: mod_base = OTHER; note = 2'-fluoro-adenosine
  modified_base 17: mod_base = OTHER; note = 2'-O-methyl-adenosine
  modified_base 18: mod_base = OTHER; note = 2'-O-methyl-guanosine
  modified_base 19: mod_base = OTHER; note = 2'-O-methyl-uridine
  modified_base 20: mod_base = OTHER; note = 2'-O-methyl-adenosine with phosphorothioate linkage
  modified_base 21: mod_base = OTHER; note = 2'-O-methyl-uridine with phosphorothioate linkage
  modified_base 22: mod_base = OTHER; note = 2'-O-methyl-adenosine
tacatttgacagcataagtata

SEQ ID NO: 533 - RNA, 22 nt, synthetic construct
  source 1..22: mol_type = other RNA
  modified_base 1: mod_base = OTHER; note = 2'-O-methyl-uridine with phosphorothioate linkage
  modified_base 2: mod_base = OTHER; note = 2'-fluoro-adenosine with phosphorothioate linkage
  modified_base 3: mod_base = OTHER; note = 2'-fluoro-adenosine
  modified_base 4: mod_base = OTHER; note = 2'-O-methyl-cytidine
  modified_base 5: mod_base = OTHER; note = 2'-fluoro-adenosine
  modified_base 6: mod_base = OTHER; note = 2'-O-methyl-uridine
  modified_base 7: mod_base = OTHER; note = 2'-fluoro-uridine
  modified_base 8: mod_base = OTHER; note = 2'-O-methyl-uridine
  modified_base 9: mod_base = OTHER; note = 2'-O-methyl-guanosine
  modified_base 10: mod_base = OTHER; note = 2'-fluoro-adenosine
  modified_base 11: mod_base = OTHER; note = 2'-O-methyl-cytidine
  modified_base 12: mod_base = OTHER; note = 2'-O-methyl-adenosine
  modified_base 13: mod_base = OTHER; note = 2'-O-methyl-guanosine
  modified_base 14: mod_base = OTHER; note = 2'-fluoro-cytidine
  modified_base 15: mod_base = OTHER; note = 2'-O-methyl-adenosine
  modified_base 16: mod_base = OTHER; note = 2'-fluoro-uridine
  modified_base 17: mod_base = OTHER; note = 2'-O-methyl-adenosine
  modified_base 18: mod_base = OTHER; note = 2'-O-methyl-adenosine
  modified_base 19: mod_base = OTHER; note = 2'-O-methyl-guanosine
  modified_base 20: mod_base = OTHER; note = 2'-O-methyl-uridine with phosphorothioate linkage
  modified_base 21: mod_base = OTHER; note = 2'-O-methyl-adenosine with phosphorothioate linkage
  modified_base 22: mod_base = OTHER; note = 2'-O-methyl-uridine
taacatttgacagcataagtat

SEQ ID NO: 534 - RNA, 22 nt, synthetic construct
  source 1..22: mol_type = other RNA
  modified_base 1: mod_base = OTHER; note = 2'-O-methyl-uridine with phosphorothioate linkage
  modified_base 2: mod_base = OTHER; note = 2'-fluoro-adenosine with phosphorothioate linkage
  modified_base 3: mod_base = OTHER; note = 2'-fluoro-uridine
  modified_base 4: mod_base = OTHER; note = 2'-O-methyl-adenosine
  modified_base 5: mod_base = OTHER; note = 2'-fluoro-adenosine
  modified_base 6: mod_base = OTHER; note = 2'-O-methyl-cytidine
  modified_base 7: mod_base = OTHER; note = 2'-fluoro-adenosine
  modified_base 8: mod_base = OTHER; note = 2'-O-methyl-uridine
  modified_base 9: mod_base = OTHER; note = 2'-O-methyl-uridine
  modified_base 10: mod_base = OTHER; note = 2'-fluoro-uridine
  modified_base 11: mod_base = OTHER; note = 2'-O-methyl-guanosine
  modified_base 12: mod_base = OTHER; note = 2'-O-methyl-adenosine
  modified_base 13: mod_base = OTHER; note = 2'-O-methyl-cytidine
  modified_base 14: mod_base = OTHER; note = 2'-fluoro-adenosine
  modified_base 15: mod_base = OTHER; note = 2'-O-methyl-guanosine
  modified_base 16: mod_base = OTHER; note = 2'-fluoro-cytidine
  modified_base 17: mod_base = OTHER; note = 2'-O-methyl-adenosine
  modified_base 18: mod_base = OTHER; note = 2'-O-methyl-uridine
  modified_base 19: mod_base = OTHER; note = 2'-O-methyl-adenosine
  modified_base 20: mod_base = OTHER; note = 2'-O-methyl-adenosine with phosphorothioate linkage
  modified_base 21: mod_base = OTHER; note = 2'-O-methyl-guanosine with phosphorothioate linkage
  modified_base 22: mod_base = OTHER; note = 2'-O-methyl-uridine
tataacatttgacagcataagt

SEQ ID NO: 535 - RNA, 22 nt, synthetic construct
  source 1..22: mol_type = other RNA
  modified_base 1: mod_base = OTHER; note = 2'-O-methyl-uridine with phosphorothioate linkage
  modified_base 2: mod_base = OTHER; note = 2'-fluoro-uridine with phosphorothioate linkage
  modified_base 3: mod_base = OTHER; note = 2'-fluoro-adenosine
  modified_base 4: mod_base = OTHER; note = 2'-O-methyl-uridine
  modified_base 5: mod_base = OTHER; note = 2'-fluoro-adenosine
  modified_base 6: mod_base = OTHER; note = 2'-O-methyl-adenosine
  modified_base 7: mod_base = OTHER; note = 2'-fluoro-cytidine
  modified_base 8: mod_base = OTHER; note = 2'-O-methyl-adenosine
  modified_base 9: mod_base = OTHER; note = 2'-O-methyl-uridine
  modified_base 10: mod_base = OTHER; note = 2'-fluoro-uridine
  modified_base 11: mod_base = OTHER; note = 2'-O-methyl-uridine
  modified_base 12: mod_base = OTHER; note = 2'-O-methyl-guanosine
  modified_base 13: mod_base = OTHER; note = 2'-O-methyl-adenosine
  modified_base 14: mod_base = OTHER; note = 2'-fluoro-cytidine
  modified_base 15: mod_base = OTHER; note = 2'-O-methyl-adenosine
  modified_base 16: mod_base = OTHER; note = 2'-fluoro-guanosine
  modified_base 17: mod_base = OTHER; note = 2'-O-methyl-cytidine
  modified_base 18: mod_base = OTHER; note = 2'-O-methyl-adenosine
  modified_base 19: mod_base = OTHER; note = 2'-O-methyl-uridine
  modified_base 20: mod_base = OTHER; note = 2'-O-methyl-adenosine with phosphorothioate linkage
  modified_base 21: mod_base = OTHER; note = 2'-O-methyl-adenosine with phosphorothioate linkage
  modified_base 22: mod_base = OTHER; note = 2'-O-methyl-guanosine
ttataacatttgacagcataag

SEQ ID NO: 536 - RNA, 22 nt, synthetic construct
  source 1..22: mol_type = other RNA
  modified_base 1: mod_base = OTHER; note = 2'-O-methyl-uridine with phosphorothioate linkage
  modified_base 2: mod_base = OTHER; note = 2'-fluoro-guanosine with phosphorothioate linkage
  modified_base 3: mod_base = OTHER; note = 2'-fluoro-adenosine
  modified_base 4: mod_base = OTHER; note = 2'-O-methyl-adenosine
  modified_base 5: mod_base = OTHER; note = 2'-fluoro-guanosine
  modified_base 6: mod_base = OTHER; note = 2'-O-methyl-adenosine
  modified_base 7: mod_base = OTHER; note = 2'-fluoro-adenosine
  modified_base 8: mod_base = OTHER; note = 2'-O-methyl-adenosine
  modified_base 9: mod_base = OTHER; note = 2'-O-methyl-guanosine
  modified_base 10: mod_base = OTHER; note = 2'-fluoro-cytidine
  modified_base 11: mod_base = OTHER; note = 2'-O-methyl-adenosine
  modified_base 12: mod_base = OTHER; note = 2'-O-methyl-uridine
  modified_base 13: mod_base = OTHER; note = 2'-O-methyl-adenosine
  modified_base 14: mod_base = OTHER; note = 2'-fluoro-cytidine
  modified_base 15: mod_base = OTHER; note = 2'-O-methyl-adenosine
  modified_base 16: mod_base = OTHER; note = 2'-fluoro-adenosine
  modified_base 17: mod_base = OTHER; note = 2'-O-methyl-cytidine
  modified_base 18: mod_base = OTHER; note = 2'-O-methyl-adenosine
  modified_base 19: mod_base = OTHER; note = 2'-O-methyl-guanosine
  modified_base 20: mod_base = OTHER; note = 2'-O-methyl-adenosine with phosphorothioate linkage
  modified_base 21: mod_base = OTHER; note = 2'-O-methyl-adenosine with phosphorothioate linkage
  modified_base 22: mod_base = OTHER; note = 2'-O-methyl-uridine
tgaagaaagcatacaacagaat

SEQ ID NO: 537 - RNA, 22 nt, synthetic construct
  source 1..22: mol_type = other RNA
  modified_base 1: mod_base = OTHER; note = 2'-O-methyl-uridine with phosphorothioate linkage
  modified_base 2: mod_base = OTHER; note = 2'-fluoro-uridine with phosphorothioate linkage
  modified_base 3: mod_base = OTHER; note = 2'-fluoro-adenosine
  modified_base 4: mod_base = OTHER; note = 2'-O-methyl-guanosine
  modified_base 5: mod_base = OTHER; note = 2'-fluoro-adenosine
  modified_base 6: mod_base = OTHER; note = 2'-O-methyl-adenosine
  modified_base 7: mod_base = OTHER; note = 2'-fluoro-guanosine
  modified_base 8: mod_base = OTHER; note = 2'-O-methyl-adenosine
  modified_base 9: mod_base = OTHER; note = 2'-O-methyl-adenosine
  modified_base 10: mod_base = OTHER; note = 2'-fluoro-adenosine
  modified_base 11: mod_base = OTHER; note = 2'-O-methyl-guanosine
  modified_base 12: mod_base = OTHER; note = 2'-O-methyl-cytidine
  modified_base 13: mod_base = OTHER; note = 2'-O-methyl-adenosine
  modified_base 14: mod_base = OTHER; note = 2'-fluoro-uridine
  modified_base 15: mod_base = OTHER; note = 2'-O-methyl-adenosine
  modified_base 16: mod_base = OTHER; note = 2'-fluoro-cytidine
  modified_base 17: mod_base = OTHER; note = 2'-O-methyl-adenosine
  modified_base 18: mod_base = OTHER; note = 2'-O-methyl-adenosine
  modified_base 19: mod_base = OTHER; note = 2'-O-methyl-cytidine
  modified_base 20: mod_base = OTHER; note = 2'-O-methyl-adenosine with phosphorothioate linkage
  modified_base 21: mod_base = OTHER; note = 2'-O-methyl-guanosine with phosphorothioate linkage
  modified_base 22: mod_base = OTHER; note = 2'-O-methyl-adenosine
ttagaagaaagcatacaacaga

SEQ ID NO: 538 - RNA, 20 nt, synthetic construct
  source 1..20: mol_type = other RNA
gaagatgtggctgtgaaaaa

SEQ ID NO: 539 - RNA, 20 nt, synthetic construct
  source 1..20: mol_type = other RNA
tgtgtcaaagaagactgcaa

SEQ ID NO: 540 - RNA, 20 nt, synthetic construct
  source 1..20: mol_type = other RNA
tgaatgctcaagtcttctga

SEQ ID NO: 541 - RNA, 20 nt, synthetic construct
  source 1..20: mol_type = other RNA
gaatgctcaagtcttctgta

SEQ ID NO: 542 - RNA, 20 nt, synthetic construct
  source 1..20: mol_type = other RNA
aatgctcaagtcttctgtca

SEQ ID NO: 543 - RNA, 20 nt, synthetic construct
  source 1..20: mol_type = other RNA
atgctcaagtcttctgtcaa

SEQ ID NO: 544 - RNA, 20 nt, synthetic construct
  source 1..20: mol_type = other RNA
tgctcaagtcttctgtcata

SEQ ID NO: 545 - RNA, 20 nt, synthetic construct
  source 1..20: mol_type = other RNA
gctcaagtcttctgtcataa

SEQ ID NO: 546 - RNA, 20 nt, synthetic construct
  source 1..20: mol_type = other RNA
ctcaagtcttctgtcataga

SEQ ID NO: 547 - RNA, 20 nt, synthetic construct
  source 1..20: mol_type = other RNA
tcaagtcttctgtcatagta

SEQ ID NO: 548 - RNA, 20 nt, synthetic construct
  source 1..20: mol_type = other RNA
caagtcttctgtcatagtta

SEQ ID NO: 549 - RNA, 20 nt, synthetic construct
  source 1..20: mol_type = other RNA
catagttccaacaatgttaa

SEQ ID NO: 550 - RNA, 20 nt, synthetic construct
  source 1..20: mol_type = other RNA
atagttccaacaatgttaca

SEQ ID NO: 551 - RNA, 20 nt, synthetic construct
  source 1..20: mol_type = other RNA
tagttccaacaatgttacca

SEQ ID NO: 552 - RNA, 20 nt, synthetic construct
  source 1..20: mol_type = other RNA
agttccaacaatgttaccaa

SEQ ID NO: 553 - RNA, 20 nt, synthetic construct
  source 1..20: mol_type = other RNA
gttccaacaatgttaccaaa

SEQ ID NO: 554 - RNA, 20 nt, synthetic construct
  source 1..20: mol_type = other RNA
ttccaacaatgttaccaaaa

SEQ ID NO: 555 - RNA, 20 nt, synthetic construct
  source 1..20: mol_type = other RNA
tccaacaatgttaccaaaaa

SEQ ID NO: 556 - RNA, 20 nt, synthetic construct
  source 1..20: mol_type = other RNA
caacaatgttaccaaaacca

SEQ ID NO: 557 - RNA, 20 nt, synthetic construct
  source 1..20: mol_type = other RNA
acaatgttaccaaaaccgaa

SEQ ID NO: 558 - RNA, 20 nt, synthetic construct
  source 1..20: mol_type = other RNA
aatgttaccaaaaccgaata

SEQ ID NO: 559 - RNA, 20 nt, synthetic construct
  source 1..20: mol_type = other RNA
tgttaccaaaaccgaatgca

SEQ ID NO: 560 - RNA, 20 nt, synthetic construct
  source 1..20: mol_type = other RNA
ttaccaaaaccgaatgctga

SEQ ID NO: 561 - RNA, 20 nt, synthetic construct
  source 1..20: mol_type = other RNA
tggaacttggactcaactta

SEQ ID NO: 562 - RNA, 20 nt, synthetic construct
  source 1..20: mol_type = other RNA
gaacttggactcaactttga

SEQ ID NO: 563 - RNA, 20 nt, synthetic construct
  source 1..20: mol_type = other RNA
acttggactcaactttggca

SEQ ID NO: 564 - RNA, 20 nt, synthetic construct
  source 1..20: mol_type = other RNA
ttggactcaactttggctga

SEQ ID NO: 565 - RNA, 20 nt, synthetic construct
  source 1..20: mol_type = other RNA
ggactcaactttggctggta

SEQ ID NO: 566 - RNA, 20 nt, synthetic construct
  source 1..20: mol_type = other RNA
actcaactttggctggtata

SEQ ID NO: 567 - RNA, 20 nt, synthetic construct
  source 1..20: mol_type = other RNA
ctcaactttggctggtatca

SEQ ID NO: 568 - RNA, 20 nt, synthetic construct
  source 1..20: mol_type = other RNA
tcaactttggctggtatcta

SEQ ID NO: 569 - RNA, 20 nt, synthetic construct
  source 1..20: mol_type = other RNA
aactttggctggtatctgaa

SEQ ID NO: 570 - RNA, 20 nt, synthetic construct
  source 1..20: mol_type = other RNA
actttggctggtatctgaaa

SEQ ID NO: 571 - RNA, 20 nt, synthetic construct
  source 1..20: mol_type = other RNA
ctttggctggtatctgaata

SEQ ID NO: 572 - RNA, 20 nt, synthetic construct
  source 1..20: mol_type = other RNA
tttggctggtatctgaataa

SEQ ID NO: 573 - RNA, 20 nt, synthetic construct
  source 1..20: mol_type = other RNA
atatcatgaacagggctcca

SEQ ID NO: 574 - RNA, 20 nt, synthetic construct
  source 1..20: mol_type = other RNA
tatcatgaacagggctccta

SEQ ID NO: 575 - RNA, 20 nt, synthetic construct
  source 1..20: mol_type = other RNA
atcatgaacagggctcctta

SEQ ID NO: 576 - RNA, 20 nt, synthetic construct
  source 1..20: mol_type = other RNA
tcatgaacagggctccttaa

SEQ ID NO: 577 - RNA, 20 nt, synthetic construct
  source 1..20: mol_type = other RNA
catgaacagggctccttata

SEQ ID NO: 578 - RNA, 20 nt, synthetic construct
  source 1..20: mol_type = other RNA
atgaacagggctccttataa

SEQ ID NO: 579 - RNA, 20 nt, synthetic construct
  source 1..20: mol_type = other RNA
tgaacagggctccttatata

SEQ ID NO: 580 - RNA, 20 nt, synthetic construct
  source 1..20: mol_type = other RNA
gaacagggctccttatatga

SEQ ID NO: 581 - RNA, 20 nt, synthetic construct
  source 1..20: mol_type = other RNA
acagggctccttatatgaca

SEQ ID NO: 582 - RNA, 20 nt, synthetic construct
  source 1..20: mol_type = other RNA
agggctccttatatgactaa

SEQ ID NO: 583 - RNA, 20 nt, synthetic construct
  source 1..20: mol_type = other RNA
ggctccttatatgactatta

SEQ ID NO: 584 - RNA, 20 nt, synthetic construct
  source 1..20: mol_type = other RNA
ctccttatatgactatttga

SEQ ID NO: 585 - RNA, 20 nt, synthetic construct
  source 1..20: mol_type = other RNA
gacaacaaagataatggaaa

SEQ ID NO: 586 - RNA, 20 nt, synthetic construct
  source 1..20: mol_type = other RNA
ggcatgtcacatctagaata

SEQ ID NO: 587 - RNA, 20 nt, synthetic construct
  source 1..20: mol_type = other RNA
gcatgtcacatctagaatta

SEQ ID NO: 588 - RNA, 20 nt, synthetic construct
  source 1..20: mol_type = other RNA
ctcttcttatacctaagaaa

SEQ ID NO: 589 - RNA, 20 nt, synthetic construct
  source 1..20: mol_type = other RNA
cttcttatacctaagaacaa

SEQ ID NO: 590 - RNA, 20 nt, synthetic construct
  source 1..20: mol_type = other RNA
gccaaccgcgcacttcaaaa

SEQ ID NO: 591 - RNA, 20 nt, synthetic construct
  source 1..20: mol_type = other RNA
ccaaccgcgcacttcaaaaa

SEQ ID NO: 592 - RNA, 20 nt, synthetic construct
  source 1..20: mol_type = other RNA
gtgtgtatgtcttttgtgta

SEQ ID NO: 593 - RNA, 20 nt, synthetic construct
  source 1..20: mol_type = other RNA
gtatgtcttttgtgtgatta

SEQ ID NO: 594 - RNA, 20 nt, synthetic construct
  source 1..20: mol_type = other RNA
cttttgtgtgattcttcaaa

SEQ ID NO: 595 - RNA, 20 nt, synthetic construct
  source 1..20: mol_type = other RNA
catcagtcatgctaaccaaa

SEQ ID NO: 596 - RNA, 20 nt, synthetic construct
  source 1..20: mol_type = other RNA
ctcccttccagaactgaata

SEQ ID NO: 597 - RNA, 20 nt, synthetic construct
  source 1..20: mol_type = other RNA
gcttcacagatttttgcaaa

SEQ ID NO: 598 - RNA, 20 nt, synthetic construct
  source 1..20: mol_type = other RNA
cagatttttgcaacaacata

SEQ ID NO: 599 - RNA, 20 nt, synthetic construct
  source 1..20: mol_type = other RNA
catggagctggccatcatta

SEQ ID NO: 600 - RNA, 20 nt, synthetic construct
  source 1..20: mol_type = other RNA
ggagctggccatcattatta

SEQ ID NO: 601 - RNA, 20 nt, synthetic construct
  source 1..20: mol_type = other RNA
gtgctcctacaggaagaaaa

SEQ ID NO: 602 - RNA, 20 nt, synthetic construct
  source 1..20: mol_type = other RNA
gctcctacaggaagaaaaaa

SEQ ID NO: 603 - RNA, 20 nt, synthetic construct
  source 1..20: mol_type = other RNA
ctgagtgcaatctggtaaaa

SEQ ID NO: 604 - RNA, 20 nt, synthetic construct
  source 1..20: mol_type = other RNA
gtgcaatctggtaaatgcta

SEQ ID NO: 605 - RNA, 20 nt, synthetic construct
  source 1..20: mol_type = other RNA
ctacctctgttggttcaaaa

SEQ ID NO: 606 - RNA, 20 nt, synthetic construct
  source 1..20: mol_type = other RNA
caattgcaaggacgattgta

SEQ ID NO: 607 - RNA, 20 nt, synthetic construct
  source 1..20: mol_type = other RNA
gaaatagtaggaaaaggtaa

SEQ ID NO: 608 - RNA, 20 nt, synthetic construct
  source 1..20: mol_type = other RNA
ggaagatgtggctgtgaaaa

SEQ ID NO: 609 - RNA, 20 nt, synthetic construct
  source 1..20: mol_type = other RNA
ctcctccagagatgaaagaa

SEQ ID NO: 610 - RNA, 20 nt, synthetic construct
  source 1..20: mol_type = other RNA
ctccagagatgaaagatcta

SEQ ID NO: 611 - RNA, 20 nt, synthetic construct
  source 1..20: mol_type = other RNA
ggtttcgtgaggcagaaata

SEQ ID NO: 612 - RNA, 20 nt, synthetic construct
  source 1..20: mol_type = other RNA
gtttcgtgaggcagaaatta

SEQ ID NO: 613 - RNA, 20 nt, synthetic construct
  source 1..20: mol_type = other RNA
ggtcatgctgcgacatgaaa

SEQ ID NO: 614 - RNA, 20 nt, synthetic construct
  source 1..20: mol_type = other RNA
cattgctgctgacaacaaaa

SEQ ID NO: 615 - RNA, 20 nt, synthetic construct
  source 1..20: mol_type = other RNA
cagggctccttatatgacta

SEQ ID NO: 616 - RNA, 20 nt, synthetic construct
  source 1..20: mol_type = other RNA
ggtctggcacaccttcataa

SEQ ID NO: 617 - RNA, 20 nt, synthetic construct
  source 1..20: mol_type = other RNA
gtctggcacaccttcatata

SEQ ID NO: 618 - RNA, 20 nt, synthetic construct
  source 1..20: mol_type = other RNA
catcgagacataaaatcaaa

SEQ ID NO: 619 - RNA, 20 nt, synthetic construct
  source 1..20: mol_type = other RNA
cgagacataaaatcaaagaa

SEQ ID NO: 620 - RNA, 20 nt, synthetic construct
  source 1..20: mol_type = other RNA
gattcaatactgaacactaa

SEQ ID NO: 621 - RNA, 20 nt, synthetic construct
  source 1..20: mol_type = other RNA
gacatacctcagaatcctaa

SEQ ID NO: 622 - RNA, 20 nt, synthetic construct
  source 1..20: mol_type = other RNA
ggtatatggctcctgaaata

SEQ ID NO: 623 - RNA, 20 nt, synthetic construct
  source 1..20: mol_type = other RNA
ctttgagtccttcaaacgaa

SEQ ID NO: 624 - RNA, 20 nt, synthetic construct
  source 1..20: mol_type = other RNA
ccaaaccagtggcaaagtta

SEQ ID NO: 625 - RNA, 20 nt, synthetic construct
  source 1..20: mol_type = other RNA
ccagtggcaaagttgtgaaa

SEQ ID NO: 626 - RNA, 20 nt, synthetic construct
  source 1..20: mol_type = other RNA
cgcctaactgctcttcgtaa

SEQ ID NO: 627 - RNA, 20 nt, synthetic construct
  source 1..20: mol_type = other RNA
cttcgtattaagaagactaa

SEQ ID NO: 628 - RNA, 20 nt, synthetic construct
  source 1..20: mol_type = other RNA
gaagactatatctcaactta

SEQ ID NO: 629 - RNA, 20 nt, synthetic construct
  source 1..20: mol_type = other RNA
gactatatctcaactttgta

SEQ ID NO: 630 - RNA, 20 nt, synthetic construct
  source 1..20: mol_type = other RNA
ctatatctcaactttgtgta

SEQ ID NO: 631 - RNA, 20 nt, synthetic construct
  source 1..20: mol_type = other RNA
gactgcaaagcctaatgata

SEQ ID NO: 632 - RNA, 20 nt, synthetic construct
  source 1..20: mol_type = other RNA
gataagacagtacagtatta

SEQ ID NO: 633 - RNA, 20 nt, synthetic construct
  source 1..20: mol_type = other RNA
gacagtacagtatttaagta

SEQ ID NO: 634 - RNA, 20 nt, synthetic construct
  source 1..20: mol_type = other RNA
catgggcaggagttgactta

SEQ ID NO: 635 - RNA, 20 nt, synthetic construct
  source 1..20: mol_type = other RNA
gggcaggagttgacttcata

SEQ ID NO: 636 - RNA, 20 nt, synthetic construct
  source 1..20: mol_type = other RNA
gttagcaggactttttaaaa

SEQ ID NO: 637 - RNA, 20 nt, synthetic construct
  source 1..20: mol_type = other RNA
ctgaaccactaaacttgtta

SEQ ID NO: 638 - RNA, 20 nt, synthetic construct
  source 1..20: mol_type = other RNA
ccttgaatagtgcttttcta

SEQ ID NO: 639 - RNA, 20 nt, synthetic construct
  source 1..20: mol_type = other RNA
gaaccatatctgttgacata

SEQ ID NO: 640 - RNA, 20 nt, synthetic construct
  source 1..20: mol_type = other RNA
ccatatctgttgacatttta

SEQ ID NO: 641 - RNA, 20 nt, synthetic construct
  source 1..20: mol_type = other RNA
cagaggtccctatttcctta

SEQ ID NO: 642 - RNA, 20 nt, synthetic construct
  source 1..20: mol_type = other RNA
ggtccctatttcctttgtaa

SEQ ID NO: 643 - RNA, 20 nt, synthetic construct
  source 1..20: mol_type = other RNA
ccctatttcctttgtacata

SEQ ID NO: 644 - RNA, 20 nt, synthetic construct
  source 1..20: mol_type = other RNA
cctatttcctttgtacataa

SEQ ID NO: 645 - RNA, 20 nt, synthetic construct
  source 1..20: mol_type = other RNA
cacttagaaagaaaagacaa

SEQ ID NO: 646 - RNA, 20 nt, synthetic construct
  source 1..20: mol_type = other RNA
gtggacacagagtaatgaaa

SEQ ID NO: 647 - RNA, 20 nt, synthetic construct
  source 1..20: mol_type = other RNA
gatagtacatgttagcataa

SEQ ID NO: 648 - RNA, 20 nt, synthetic construct
  source 1..20: mol_type = other RNA
cgtggtggaacccttttata

SEQ ID NO: 649 - RNA, 20 nt, synthetic construct
  source 1..20: mol_type = other RNA
gtggtggaacccttttatta

SEQ ID NO: 650 - RNA, 20 nt, synthetic construct
  source 1..20: mol_type = other RNA
ggtggaacccttttattaaa

SEQ ID NO: 651 - RNA, 20 nt, synthetic construct
  source 1..20: mol_type = other RNA
ctatcccatatttaactgta

SEQ ID NO: 652 - RNA, 20 nt, synthetic construct
  source 1..20: mol_type = other RNA
cccatatttaactgttctaa

SEQ ID NO: 653 - RNA, 20 nt, synthetic construct
  source 1..20: mol_type = other RNA
gctctcatccacttattaaa

SEQ ID NO: 654 - RNA, 20 nt, synthetic construct
  source 1..20: mol_type = other RNA
cacaatatcgggtacaagaa

SEQ ID NO: 655 - RNA, 20 nt, synthetic construct
  source 1..20: mol_type = other RNA
gggaatacaaagatagataa

SEQ ID NO: 656 - RNA, 20 nt, synthetic construct
  source 1..20: mol_type = other RNA
ctgccctcagggattttaaa

SEQ ID NO: 657 - RNA, 20 nt, synthetic construct
  source 1..20: mol_type = other RNA
ctaggataggtctgaaaata

SEQ ID NO: 658 - RNA, 20 nt, synthetic construct
  source 1..20: mol_type = other RNA
gaaagtagctttatttggaa

SEQ ID NO: 659 - RNA, 20 nt, synthetic construct
  source 1..20: mol_type = other RNA
ggatattacagacaatctaa

SEQ ID NO: 660 - RNA, 20 nt, synthetic construct
  source 1..20: mol_type = other RNA
gtgcctcaaataaacaagaa

SEQ ID NO: 661 - RNA, 20 nt, synthetic construct
  source 1..20: mol_type = other RNA
gcctcaaataaacaagaata

SEQ ID NO: 662 - RNA, 20 nt, synthetic construct
  source 1..20: mol_type = other RNA
cttatttgagggtgtctaaa

SEQ ID NO: 663 - RNA, 20 nt, synthetic construct
  source 1..20: mol_type = other RNA
ctgaagaaatccgtatgtta

SEQ ID NO: 664 - RNA, 20 nt, synthetic construct
  source 1..20: mol_type = other RNA
ccgtatgttagtacatttta

SEQ ID NO: 665 - RNA, 20 nt, synthetic construct
  source 1..20: mol_type = other RNA
cataaggcaggcttcttgta

SEQ ID NO: 666 - RNA, 20 nt, synthetic construct
  source 1..20: mol_type = other RNA
cttatgctgtcaaatgttaa

SEQ ID NO: 667 - RNA, 20 nt, synthetic construct
  source 1..20: mol_type = other RNA
cagtatttcagcatgaacta

SEQ ID NO: 668 - RNA, 20 nt, synthetic construct
  source 1..20: mol_type = other RNA
cagattctgttgtatgctta

SEQ ID NO: 669 - RNA, 20 nt, synthetic construct
  source 1..20: mol_type = other RNA
ctgttgtatgctttcttcta

SEQ ID NO: 670 - RNA, 20 nt, synthetic construct
  source 1..20: mol_type = other RNA
gttgtatgctttcttctata

SEQ ID NO: 671 - RNA, 20 nt, synthetic construct
  source 1..20: mol_type = other RNA
gacttgagagttaagtgaaa

SEQ ID NO: 672 - RNA, 20 nt, synthetic construct
  source 1..20: mol_type = other RNA
gactgtcgtgcactatttta

SEQ ID NO: 673 - RNA, 20 nt, synthetic construct
  source 1..20: mol_type = other RNA
gcatagcacttgcttttcaa

SEQ ID NO: 674 - RNA, 20 nt, synthetic construct
  source 1..20: mol_type = other RNA
gattcattaggttagaagta

SEQ ID NO: 675 - RNA, 20 nt, synthetic construct
  source 1..20: mol_type = other RNA
gcttgttagggcatagtcta

SEQ ID NO: 676 - RNA, 20 nt, synthetic construct
  source 1..20: mol_type = other RNA
cttgttagggcatagtctta

SEQ ID NO: 677 - RNA, 20 nt, synthetic construct
  source 1..20: mol_type = other RNA
gttagggcatagtctttgaa

SEQ ID NO: 678 - RNA, 20 nt, synthetic construct
  source 1..20: mol_type = other RNA
ggcatagtctttgattgaaa

SEQ ID NO: 679 - RNA, 20 nt, synthetic construct
  source 1..20: mol_type = other RNA
cttgagagctgcttctaaaa

SEQ ID NO: 680 - RNA, 20 nt, synthetic construct
  source 1..20: mol_type = other RNA
gggcatttttcaaaacatta

SEQ ID NO: 681 - RNA, 20 nt, synthetic construct
  source 1..20: mol_type = other RNA
catctagccttgctttataa

SEQ ID NO: 682 - RNA, 20 nt, synthetic construct
  source 1..20: mol_type = other RNA
ctagccttgctttatattta

SEQ ID NO: 683 - RNA, 20 nt, synthetic construct
  source 1..20: mol_type = other RNA
gccttgctttatatttcata

SEQ ID NO: 684 - RNA, 20 nt, synthetic construct
  source 1..20: mol_type = other RNA
cttaatattccctcactata

SEQ ID NO: 685 - RNA, 20 nt, synthetic construct
  source 1..20: mol_type = other RNA
gccttctaatgaaagagaaa

SEQ ID NO: 686 - RNA, 20 nt, synthetic construct
  source 1..20: mol_type = other RNA
gaaagagaatcccttagtaa

SEQ ID NO: 687 - RNA, 20 nt, synthetic construct
  source 1..20: mol_type = other RNA
ccaaggatcagagattaaaa

SEQ ID NO: 688 - RNA, 20 nt, synthetic construct
  source 1..20: mol_type = other RNA
ccattcaatgatgatgataa

SEQ ID NO: 689 - RNA, 20 nt, synthetic construct
  source 1..20: mol_type = other RNA
gtttgtctttggcattcata

SEQ ID NO: 690 - RNA, 20 nt, synthetic construct
  source 1..20: mol_type = other RNA
ctttggcattcatcttctta

SEQ ID NO: 691 - RNA, 20 nt, synthetic construct
  source 1..20: mol_type = other RNA
gcattcatcttcttttagta

SEQ ID NO: 692 - RNA, 20 nt, synthetic construct
  source 1..20: mol_type = other RNA
ggcactatagagtatttgta

SEQ ID NO: 693 - RNA, 20 nt, synthetic construct
  source 1..20: mol_type = other RNA
gaatgtctacttttgcttta

SEQ ID NO: 694 - RNA, 20 nt, synthetic construct
  source 1..20: mol_type = other RNA
cagcaaaattaggtaacaaa

SEQ ID NO: 695 - RNA, 20 nt, synthetic construct
  source 1..20: mol_type = other RNA
gaactgccagcatactttta

SEQ ID NO: 696 - RNA, 20 nt, synthetic construct
  source 1..20: mol_type = other RNA
gccagcatacttttctctta

SEQ ID NO: 697 - RNA, 20 nt, synthetic construct
  source 1..20: mol_type = other RNA
ctctttcagttgtagatgaa

SEQ ID NO: 698 - RNA, 20 nt, synthetic construct
  source 1..20: mol_type = other RNA
ctttcagttgtagatgaata

SEQ ID NO: 699 - RNA, 20 nt, synthetic construct
  source 1..20: mol_type = other RNA
caattggctcccagacataa

SEQ ID NO: 700 - RNA, 20 nt, synthetic construct
  source 1..20: mol_type = other RNA
ggctcccagacataatttta

SEQ ID NO: 701 - RNA, 20 nt, synthetic construct
  source 1..20: mol_type = other RNA
gcatcttattggcttatata

SEQ ID NO: 702 - RNA, 20 nt, synthetic construct
  source 1..20: mol_type = other RNA
gaatggtctggcttatacaa

SEQ ID NO: 703 - RNA, 20 nt, synthetic construct
  source 1..20: mol_type = other RNA
ggtctggcttatacatctta

SEQ ID NO: 704 - RNA, 20 nt, synthetic construct
  source 1..20: mol_type = other RNA
cagttttcattctatgcata

SEQ ID NO: 705 - RNA, 20 nt, synthetic construct
  source 1..20: mol_type = other RNA
ctatgcatggagctaattaa

SEQ ID NO: 706 - RNA, 20 nt, synthetic construct
  source 1..20: mol_type = other RNA
gcatggagctaattactgaa

SEQ ID NO: 707 - RNA, 20 nt, synthetic construct
  source 1..20: mol_type = other RNA
ggagctaattactgacttta

SEQ ID NO: 708 - RNA, 20 nt, synthetic construct
  source 1..20: mol_type = other RNA
cttccataggctaaataata

SEQ ID NO: 709 - RNA, 20 nt, synthetic construct
  source 1..20: mol_type = other RNA
gtatctgagccaaaatatta

SEQ ID NO: 710 - RNA, 20 nt, synthetic construct
  source 1..20: mol_type = other RNA
ggagaagattattcaaacta

SEQ ID NO: 711 - RNA, 20 nt, synthetic construct
  source 1..20: mol_type = other RNA
ggaattttggattgacttta

SEQ ID NO: 712 - RNA, 20 nt, synthetic construct
  source 1..20: mol_type = other RNA
gattgactttcaaagtacta

SEQ ID NO: 713 - RNA, 20 nt, synthetic construct
  source 1..20: mol_type = other RNA
cgtgactcttcttataccta

SEQ ID NO: 714 - RNA, 20 nt, synthetic construct
  source 1..20: mol_type = other RNA
gtgactcttcttatacctaa

SEQ ID NO: 715 - RNA, 20 nt, synthetic construct
  source 1..20: mol_type = other RNA
gcaaaacatgccttgaacta

SEQ ID NO: 716 - RNA, 20 nt, synthetic construct
  source 1..20: mol_type = other RNA
ctcttgaactactgtgaaaa

SEQ ID NO: 717 - RNA, 20 nt, synthetic construct
  source 1..20: mol_type = other RNA
gaactactgtgaaaagaata

SEQ ID NO: 718 - RNA, 20 nt, synthetic construct
  source 1..20: mol_type = other RNA
gaaaagaatcaccgttgtaa

SEQ ID NO: 719 - RNA, 20 nt, synthetic construct
  source 1..20: mol_type = other RNA
caccgttgtaaagactttta

SEQ ID NO: 720 - RNA, 20 nt, synthetic construct
  source 1..20: mol_type = other RNA
gtaagctagctgatactcta

SEQ ID NO: 721 - RNA, 20 nt, synthetic construct
  source 1..20: mol_type = other RNA
ccgacaggcccaaaggaata

SEQ ID NO: 722 - RNA, 20 nt, synthetic construct
  source 1..20: mol_type = other RNA
gaattgggcaataaactgta

SEQ ID NO: 723 - RNA, 20 nt, synthetic construct
  source 1..20: mol_type = other RNA
gtagatggattttagtagta

SEQ ID NO: 724 - RNA, 20 nt, synthetic construct
  source 1..20: mol_type = other RNA
gatagcctttataccaaaaa

SEQ ID NO: 725 - RNA, 20 nt, synthetic construct
  source 1..20: mol_type = other RNA
gcctttataccaaaatgtta

SEQ ID NO: 726 - RNA, 20 nt, synthetic construct
  source 1..20: mol_type = other RNA
ctgtcttcagatgtaaataa

SEQ ID NO: 727 - RNA, 20 nt, synthetic construct
  source 1..20: mol_type = other RNA
gaagtgtgtatgtcttttga

SEQ ID NO: 728 - RNA, 20 nt, synthetic construct
  source 1..20: mol_type = other RNA
aagtgtgtatgtcttttgta

SEQ ID NO: 729 - RNA, 20 nt, synthetic construct
  source 1..20: mol_type = other RNA
agtgtgtatgtcttttgtga

SEQ ID NO: 730 - RNA, 20 nt, synthetic construct
  source 1..20: mol_type = other RNA
gtgtatgtcttttgtgtgaa

SEQ ID NO: 731 - RNA, 20 nt, synthetic construct
  source 1..20: mol_type = other RNA
tgtatgtcttttgtgtgata

SEQ ID NO: 732 - RNA, 20 nt, synthetic construct
  source 1..20: mol_type = other RNA
tatgtcttttgtgtgattca

SEQ ID NO: 733 - RNA, 20 nt, synthetic construct
  source 1..20: mol_type = other RNA
atgtcttttgtgtgattcta

SEQ ID NO: 734 - RNA, 20 nt, synthetic construct
  source 1..20: mol_type = other RNA
tgtcttttgtgtgattctta

SEQ ID NO: 735 - RNA, 20 nt, synthetic construct
  source 1..20: mol_type = other RNA
gtcttttgtgtgattcttca

SEQ ID NO: 736 - RNA, 20 nt, synthetic construct
  source 1..20: mol_type = other RNA
tcttttgtgtgattcttcaa

SEQ ID NO: 737 - RNA, 20 nt, synthetic construct
  source 1..20: mol_type = other RNA
ttttgtgtgattcttcaaaa

SEQ ID NO: 738 - RNA, 20 nt, synthetic construct
  source 1..20: mol_type = other RNA
ccaacaatgttaccaaaaca

SEQ ID NO: 739 - RNA, 20 nt, synthetic construct
  source 1..20: mol_type = other RNA
aacaatgttaccaaaaccga

SEQ ID NO: 740 - RNA, 20 nt, synthetic construct
  source 1..20: mol_type = other RNA
caatgttaccaaaaccgaaa

SEQ ID NO: 741 - RNA, 20 nt, synthetic construct
  source 1..20: mol_type = other RNA
atgttaccaaaaccgaatga

SEQ ID NO: 742 - RNA, 20 nt, synthetic construct
  source 1..20: mol_type = other RNA
gttaccaaaaccgaatgcta

SEQ ID NO: 743 - RNA, 20 nt, synthetic construct
  source 1..20: mol_type = other RNA
ccaaaaccgaatgctgctta

SEQ ID NO: 744 - RNA, 20 nt, synthetic construct
  source 1..20: mol_type = other RNA
cttcacagatttttgcaaca

SEQ ID NO: 745 - RNA, 20 nt, synthetic construct
  source 1..20: mol_type = other RNA
ttcacagatttttgcaacaa

SEQ ID NO: 746 - RNA, 20 nt, synthetic construct
  source 1..20: mol_type = other RNA
tcacagatttttgcaacaaa

SEQ ID NO: 747 - RNA, 20 nt, synthetic construct
  source 1..20: mol_type = other RNA
cacagatttttgcaacaaca

SEQ ID NO: 748 - RNA, 20 nt, synthetic construct
  source 1..20: mol_type = other RNA
acagatttttgcaacaacaa

SEQ ID NO: 749 - RNA, 20 nt, synthetic construct
  source 1..20: mol_type = other RNA
agatttttgcaacaacataa

SEQ ID NO: 750 - RNA, 20 nt, synthetic construct
  source 1..20: mol_type = other RNA
gatttttgcaacaacataaa

SEQ ID NO: 751 - RNA, 20 nt, synthetic construct
  source 1..20: mol_type = other RNA
tctctgagtgcaatctggta

SEQ ID NO: 752 - RNA, 20 nt, synthetic construct
  source 1..20: mol_type = other RNA
ctctgagtgcaatctggtaa

SEQ ID NO: 753 - RNA, 20 nt, synthetic construct
  source 1..20: mol_type = other RNA
tctgagtgcaatctggtaaa

SEQ ID NO: 754 - RNA, 20 nt, synthetic construct
  source 1..20: mol_type = other RNA
tgagtgcaatctggtaaata

SEQ ID NO: 755 - RNA, 20 nt, synthetic construct
  source 1..20: mol_type = other RNA
gagtgcaatctggtaaatga

SEQ ID NO: 756 - RNA, 20 nt, synthetic construct
  source 1..20: mol_type = other RNA
agtgcaatctggtaaatgca

SEQ ID NO: 757 - RNA, 20 nt, synthetic construct
  source 1..20: mol_type = other RNA
tggactcaactttggctgga

SEQ ID NO: 758 - RNA, 20 nt, synthetic construct
  source 1..20: mol_type = other RNA
gactcaactttggctggtaa

SEQ ID NO: 759 - RNA, 20 nt, synthetic construct
  source 1..20: mol_type = other RNA
ttggctggtatctgaatata

SEQ ID NO: 760 - RNA, 20 nt, synthetic construct
  source 1..20: mol_type = other RNA
tcgagacataaaatcaaaga

SEQ ID NO: 761 - RNA, 20 nt, synthetic construct
  source 1..20: mol_type = other RNA
gagacataaaatcaaagaaa

SEQ ID NO: 762 - RNA, 20 nt, synthetic construct
  source 1..20: mol_type = other RNA
accagtggcaaagttgtgaa

SEQ ID NO: 763 - RNA, 20 nt, synthetic construct
  source 1..20: mol_type = other RNA
ctcttcgtattaagaagaca

SEQ ID NO: 764 - RNA, 20 nt, synthetic construct
  source 1..20: mol_type = other RNA
tcttcgtattaagaagacta

SEQ ID NO: 765 - RNA, 20 nt, synthetic construct
  source 1..20: mol_type = other RNA
ttcgtattaagaagactata

SEQ ID NO: 766 - RNA, 20 nt, synthetic construct
  source 1..20: mol_type = other RNA
tcgtattaagaagactataa

SEQ ID NO: 767 - RNA, 20 nt, synthetic construct
  source 1..20: mol_type = other RNA
ttaagaagactatatctcaa

SEQ ID NO: 768 - RNA, 20 nt, synthetic construct
  source 1..20: mol_type = other RNA
taagaagactatatctcaaa

SEQ ID NO: 769 - RNA, 20 nt, synthetic construct
  source 1..20: mol_type = other RNA
aagaagactatatctcaaca

SEQ ID NO: 770 - RNA, 20 nt, synthetic construct
  source 1..20: mol_type = other RNA
agaagactatatctcaacta

SEQ ID NO: 771 - RNA, 20 nt, synthetic construct
  source 1..20: mol_type = other RNA
aagactatatctcaacttta

SEQ ID NO: 772 - RNA, 20 nt, synthetic construct
  source 1..20: mol_type = other RNA
agactatatctcaactttga

SEQ ID NO: 773 - RNA, 20 nt, synthetic construct
  source 1..20: mol_type = other RNA
actatatctcaactttgtga

SEQ ID NO: 774 - RNA, 20 nt, synthetic construct
  source 1..20: mol_type = other RNA
tatatctcaactttgtgtca

SEQ ID NO: 775 - RNA, 20 nt, synthetic construct
  source 1..20: mol_type = other RNA
tttgtgtcaaagaagactga

SEQ ID NO: 776 - RNA, 20 nt, synthetic construct
  source 1..20: mol_type = other RNA
ttgtgtcaaagaagactgca

SEQ ID NO: 777 - RNA, 20 nt, synthetic construct
  source 1..20: mol_type = other RNA
gtgtcaaagaagactgcaaa

SEQ ID NO: 778 - RNA, 20 nt, synthetic construct
  source 1..20: mol_type = other RNA
tgtcaaagaagactgcaaaa

SEQ ID NO: 779 - RNA, 20 nt, synthetic construct
  source 1..20: mol_type = other RNA
gaagactgcaaagcctaata

SEQ ID NO: 780 - RNA, 20 nt, synthetic construct
  source 1..20: mol_type = other RNA
aagactgcaaagcctaatga

SEQ ID NO: 781 - RNA, 20 nt, synthetic construct
  source 1..20: mol_type = other RNA
agactgcaaagcctaatgaa

SEQ ID NO: 782 - RNA, 20 nt, synthetic construct
  source 1..20: mol_type = other RNA
actgcaaagcctaatgatga

SEQ ID NO: 783 - RNA, 20 nt, synthetic construct
  source 1..20: mol_type = other RNA
ctgcaaagcctaatgatgaa

SEQ ID NO: 784 - RNA, 20 nt, synthetic construct
  source 1..20: mol_type = other RNA
tgcaaagcctaatgatgata

SEQ ID NO: 785 - RNA, 20 nt, synthetic construct
  source 1..20: mol_type = other RNA
agttagcaggactttttaaa

SEQ ID NO: 786 - RNA, 20 nt, synthetic construct
  source 1..20: mol_type = other RNA
gtccctatttcctttgtaca

SEQ ID NO: 787 - RNA, 20 nt, synthetic construct
  source 1..20: mol_type = other RNA
tccctatttcctttgtacaa

SEQ ID NO: 788 - RNA, 20 nt, synthetic construct
  source 1..20: mol_type = other RNA
ccctatttcctttgtacata

SEQ ID NO: 789 - RNA, 20 nt, synthetic construct
  source 1..20: mol_type = other RNA
tactatcccatatttaacta

SEQ ID NO: 790 - RNA, 20 nt, synthetic construct
  source 1..20: mol_type = other RNA
actatcccatatttaactga

SEQ ID NO: 791 - RNA, 20 nt, synthetic construct
  source 1..20: mol_type = other RNA
tatcccatatttaactgtta

SEQ ID NO: 792 - RNA, 20 nt, synthetic construct
  source 1..20: mol_type = other RNA
atcccatatttaactgttca

SEQ ID NO: 793 - RNA, 20 nt, synthetic construct
  source 1..20: mol_type = other RNA
agaaagtagctttatttgga

SEQ ID NO: 794 - RNA, 20 nt, synthetic construct
  source 1..20: mol_type = other RNA
aaagtagctttatttggata

SEQ ID NO: 795 - RNA, 20 nt, synthetic construct
  source 1..20: mol_type = other RNA
aagtagctttatttggataa

SEQ ID NO: 796 - RNA, 20 nt, synthetic construct
  source 1..20: mol_type = other RNA
agtagctttatttggatata

SEQ ID NO: 797 - RNA, 20 nt, synthetic construct
  source 1..20: mol_type = other RNA
tctgaagaaatccgtatgta

SEQ ID NO: 798 - RNA, 20 nt, synthetic construct
  source 1..20: mol_type = other RNA
tgaagaaatccgtatgttaa

SEQ ID NO: 799 - RNA, 20 nt, synthetic construct
  source 1..20: mol_type = other RNA
atacttatgctgtcaaatga

SEQ ID NO: 800 - RNA, 20 nt, synthetic construct
  source 1..20: mol_type = other RNA
tacttatgctgtcaaatgta

SEQ ID NO: 801 - RNA, 20 nt, synthetic construct
  source 1..20: mol_type = other RNA
acttatgctgtcaaatgtta

SEQ ID NO: 802 - RNA, 20 nt, synthetic construct
  source 1..20: mol_type = other RNA
ttatgctgtcaaatgttata

SEQ ID NO: 803 - RNA, 20 nt, synthetic construct
  source 1..20: mol_type = other RNA
tatgctgtcaaatgttataa

SEQ ID NO: 804 - RNA, 20 nt, synthetic construct
  source 1..20: mol_type = other RNA
tctgttgtatgctttcttca

SEQ ID NO: 805 - RNA, 20 nt, synthetic construct
  source 1..20: mol_type = other RNA
tgttgtatgctttcttctaa

SEQ ID NO: 806 - RNA, 20 nt, synthetic construct
  source 1..20: mol_type = other RNA
  modified_base 1: mod_base = OTHER; note = 2'-O-methyl-guanosine with phosphorothioate linkage
  modified_base 2: mod_base = OTHER; note = 2'-O-methyl-adenosine with phosphorothioate linkage
  modified_base 3: mod_base = OTHER; note = 2'-O-methyl-adenosine
  modified_base 4: mod_base = OTHER; note = 2'-O-methyl-guanosine
  modified_base 5: mod_base = OTHER; note = 2'-O-methyl-adenosine
  modified_base 6: mod_base = OTHER; note = 2'-fluoro-uridine
  modified_base 7: mod_base = OTHER; note = 2'-O-methyl-guanosine
  modified_base 8: mod_base = OTHER; note = 2'-fluoro-uridine
  modified_base 9: mod_base = OTHER; note = 2'-fluoro-guanosine
  modified_base 10: mod_base = OTHER; note = 2'-fluoro-guanosine
  modified_base 11: mod_base = OTHER; note = 2'-fluoro-cytidine
  modified_base 12: mod_base = OTHER; note = 2'-O-methyl-uridine
  modified_base 13: mod_base = OTHER; note = 2'-O-methyl-guanosine
  modified_base 14: mod_base = OTHER; note = 2'-O-methyl-uridine
  modified_base 15: mod_base = OTHER; note = 2'-O-methyl-guanosine
  modified_base 16: mod_base = OTHER; note = 2'-O-methyl-adenosine
  modified_base 17: mod_base = OTHER; note = 2'-O-methyl-adenosine
  modified_base 18: mod_base = OTHER; note = 2'-O-methyl-adenosine with phosphorothioate linkage
  modified_base 19: mod_base = OTHER; note = 2'-O-methyl-adenosine with phosphorothioate linkage
  modified_base 20: mod_base = OTHER; note = 2'-O-methyl-adenosine conjugated to 3 iterations of (2R,3R,4R,5S)-5-(3-(5-(((2R,3R,4R,5R,6R)- 3-acetamido-4,5-dihydroxy-6-(hydroxymethyl)tetrahydro-2H-py ran-2-yl)oxy)pentanamido)propyl)-2-((hydroxyl)methyl)-4-met hoxytetrahydrofuran-3-oxyl
gaagatgtggctgtgaaaaa

SEQ ID NO: 807 - RNA, 20 nt, synthetic construct
  source 1..20: mol_type = other RNA
  modified_base 1: mod_base = OTHER; note = 2'-O-methyl-uridine with phosphorothioate linkage
  modified_base 2: mod_base = OTHER; note = 2'-O-methyl-guanosine with phosphorothioate linkage
  modified_base 3: mod_base = OTHER; note = 2'-O-methyl-uridine
  modified_base 4: mod_base = OTHER; note = 2'-O-methyl-guanosine
  modified_base 5: mod_base = OTHER; note = 2'-O-methyl-uridine
  modified_base 6: mod_base = OTHER; note = 2'-fluoro-cytidine
  modified_base 7: mod_base = OTHER; note = 2'-O-methyl-adenosine
  modified_base 8: mod_base = OTHER; note = 2'-fluoro-adenosine
  modified_base 9: mod_base = OTHER; note = 2'-fluoro-adenosine
  modified_base 10: mod_base = OTHER; note = 2'-fluoro-guanosine
  modified_base 11: mod_base = OTHER; note = 2'-fluoro-adenosine
  modified_base 12: mod_base = OTHER; note = 2'-O-methyl-adenosine
  modified_base 13: mod_base = OTHER; note = 2'-O-methyl-guanosine
  modified_base 14: mod_base = OTHER; note = 2'-O-methyl-adenosine
  modified_base 15: mod_base = OTHER; note = 2'-O-methyl-cytidine
  modified_base 16: mod_base = OTHER; note = 2'-O-methyl-uridine
  modified_base 17: mod_base = OTHER; note = 2'-O-methyl-guanosine
  modified_base 18: mod_base = OTHER; note = 2'-O-methyl-cytidine with phosphorothioate linkage
  modified_base 19: mod_base = OTHER; note = 2'-O-methyl-adenosine with phosphorothioate linkage
  modified_base 20: mod_base = OTHER; note = 2'-O-methyl-adenosine conjugated to 3 iterations of (2R,3R,4R,5S)-5-(3-(5-(((2R,3R,4R,5R,6R)- 3-acetamido-4,5-dihydroxy-6-(hydroxymethyl)tetrahydro-2H-py ran-2-yl)oxy)pentanamido)propyl)-2-((hydroxyl)methyl)-4-met hoxytetrahydrofuran-3-oxyl
tgtgtcaaagaagactgcaa

SEQ ID NO: 808 - RNA, 20 nt, synthetic construct
  source 1..20: mol_type = other RNA
  modified_base 1: mod_base = OTHER; note = 2'-O-methyl-uridine with phosphorothioate linkage
  modified_base 2: mod_base = OTHER; note = 2'-O-methyl-guanosine with phosphorothioate linkage
  modified_base 3: mod_base = OTHER; note = 2'-O-methyl-adenosine
  modified_base 4: mod_base = OTHER; note = 2'-O-methyl-adenosine
  modified_base 5: mod_base = OTHER; note = 2'-O-methyl-uridine
  modified_base 6: mod_base = OTHER; note = 2'-fluoro-guanosine
  modified_base 7: mod_base = OTHER; note = 2'-O-methyl-cytidine
  modified_base 8: mod_base = OTHER; note = 2'-fluoro-uridine
  modified_base 9: mod_base = OTHER; note = 2'-fluoro-cytidine
  modified_base 10: mod_base = OTHER; note = 2'-fluoro-adenosine
  modified_base 11: mod_base = OTHER; note = 2'-fluoro-adenosine
  modified_base 12: mod_base = OTHER; note = 2'-O-methyl-guanosine
  modified_base 13: mod_base = OTHER; note = 2'-O-methyl-uridine
  modified_base 14: mod_base = OTHER; note = 2'-O-methyl-cytidine
  modified_base 15: mod_base = OTHER; note = 2'-O-methyl-uridine
  modified_base 16: mod_base = OTHER; note = 2'-O-methyl-uridine
  modified_base 17: mod_base = OTHER; note = 2'-O-methyl-cytidine
  modified_base 18: mod_base = OTHER; note = 2'-O-methyl-uridine with phosphorothioate linkage
  modified_base 19: mod_base = OTHER; note = 2'-O-methyl-guanosine with phosphorothioate linkage
  modified_base 20: mod_base = OTHER; note = 2'-O-methyl-adenosine conjugated to 3 iterations of (2R,3R,4R,5S)-5-(3-(5-(((2R,3R,4R,5R,6R)- 3-acetamido-4,5-dihydroxy-6-(hydroxymethyl)tetrahydro-2H-py ran-2-yl)oxy)pentanamido)propyl)-2-((hydroxyl)methyl)-4-met hoxytetrahydrofuran-3-oxyl
tgaatgctcaagtcttctga

SEQ ID NO: 809 - RNA, 20 nt, synthetic construct
  source 1..20: mol_type = other RNA
  modified_base 1: mod_base = OTHER; note = 2'-O-methyl-guanosine with phosphorothioate linkage
  modified_base 2: mod_base = OTHER; note = 2'-O-methyl-adenosine with phosphorothioate linkage
  modified_base 3: mod_base = OTHER; note = 2'-O-methyl-adenosine
  modified_base 4: mod_base = OTHER; note = 2'-O-methyl-uridine
  modified_base 5: mod_base = OTHER; note = 2'-O-methyl-guanosine
  modified_base 6: mod_base = OTHER; note = 2'-fluoro-cytidine
  modified_base 7: mod_base = OTHER; note = 2'-O-methyl-uridine
  modified_base 8: mod_base = OTHER; note = 2'-fluoro-cytidine
  modified_base 9: mod_base = OTHER; note = 2'-fluoro-adenosine
  modified_base 10: mod_base = OTHER; note = 2'-fluoro-adenosine
  modified_base 11: mod_base = OTHER; note = 2'-fluoro-guanosine
  modified_base 12: mod_base = OTHER; note = 2'-O-methyl-uridine
  modified_base 13: mod_base = OTHER; note = 2'-O-methyl-cytidine
  modified_base 14: mod_base = OTHER; note = 2'-O-methyl-uridine
  modified_base 15: mod_base = OTHER; note = 2'-O-methyl-uridine
  modified_base 16: mod_base = OTHER; note = 2'-O-methyl-cytidine
  modified_base 17: mod_base = OTHER; note = 2'-O-methyl-uridine
  modified_base 18: mod_base = OTHER; note = 2'-O-methyl-guanosine with phosphorothioate linkage
  modified_base 19: mod_base = OTHER; note = 2'-O-methyl-uridine with phosphorothioate linkage
  modified_base 20: mod_base = OTHER; note = 2'-O-methyl-adenosine conjugated to 3 iterations of (2R,3R,4R,5S)-5-(3-(5-(((2R,3R,4R,5R,6R)- 3-acetamido-4,5-dihydroxy-6-(hydroxymethyl)tetrahydro-2H-py ran-2-yl)oxy)pentanamido)propyl)-2-((hydroxyl)methyl)-4-met hoxytetrahydrofuran-3-oxyl
gaatgctcaagtcttctgta

SEQ ID NO: 810 - RNA, 20 nt, synthetic construct
  source 1..20: mol_type = other RNA
  modified_base 1: mod_base = OTHER; note = 2'-O-methyl-adenosine with phosphorothioate linkage
  modified_base 2: mod_base = OTHER; note = 2'-O-methyl-adenosine with phosphorothioate linkage
  modified_base 3: mod_base = OTHER; note = 2'-O-methyl-uridine
  modified_base 4: mod_base = OTHER; note = 2'-O-methyl-guanosine
  modified_base 5: mod_base = OTHER; note = 2'-O-methyl-cytidine
  modified_base 6: mod_base = OTHER; note = 2'-fluoro-uridine
  modified_base 7: mod_base = OTHER; note = 2'-O-methyl-cytidine
  modified_base 8: mod_base = OTHER; note = 2'-fluoro-adenosine
  modified_base 9: mod_base = OTHER; note = 2'-fluoro-adenosine
  modified_base 10: mod_base = OTHER; note = 2'-fluoro-guanosine
  modified_base 11: mod_base = OTHER; note = 2'-fluoro-uridine
  modified_base 12: mod_base = OTHER; note = 2'-O-methyl-cytidine
  modified_base 13: mod_base = OTHER; note = 2'-O-methyl-uridine
  modified_base 14: mod_base = OTHER; note = 2'-O-methyl-uridine
  modified_base 15: mod_base = OTHER; note = 2'-O-methyl-cytidine
  modified_base 16: mod_base = OTHER; note = 2'-O-methyl-uridine
  modified_base 17: mod_base = OTHER; note = 2'-O-methyl-guanosine
  modified_base 18: mod_base = OTHER; note = 2'-O-methyl-uridine with phosphorothioate linkage
  modified_base 19: mod_base = OTHER; note = 2'-O-methyl-cytidine with phosphorothioate linkage
  modified_base 20: mod_base = OTHER; note = 2'-O-methyl-adenosine conjugated to 3 iterations of (2R,3R,4R,5S)-5-(3-(5-(((2R,3R,4R,5R,6R)- 3-acetamido-4,5-dihydroxy-6-(hydroxymethyl)tetrahydro-2H-py ran-2-yl)oxy)pentanamido)propyl)-2-((hydroxyl)methyl)-4-met hoxytetrahydrofuran-3-oxyl
aatgctcaagtcttctgtca

SEQ ID NO: 811 - RNA, 20 nt, synthetic construct
  source 1..20: mol_type = other RNA
  modified_base 1: mod_base = OTHER; note = 2'-O-methyl-adenosine with phosphorothioate linkage
  modified_base 2: mod_base = OTHER; note = 2'-O-methyl-uridine with phosphorothioate linkage
  modified_base 3: mod_base = OTHER; note = 2'-O-methyl-guanosine
  modified_base 4: mod_base = OTHER; note = 2'-O-methyl-cytidine
  modified_base 5: mod_base = OTHER; note = 2'-O-methyl-uridine
  modified_base 6: mod_base = OTHER; note = 2'-fluoro-cytidine
  modified_base 7: mod_base = OTHER; note = 2'-O-methyl-adenosine
  modified_base 8: mod_base = OTHER; note = 2'-fluoro-adenosine
  modified_base 9: mod_base = OTHER; note = 2'-fluoro-guanosine
  modified_base 10: mod_base = OTHER; note = 2'-fluoro-uridine
  modified_base 11: mod_base = OTHER; note = 2'-fluoro-cytidine
  modified_base 12: mod_base = OTHER; note = 2'-O-methyl-uridine
  modified_base 13: mod_base = OTHER; note = 2'-O-methyl-uridine
  modified_base 14: mod_base = OTHER; note = 2'-O-methyl-cytidine
  modified_base 15: mod_base = OTHER; note = 2'-O-methyl-uridine
  modified_base 16: mod_base = OTHER; note = 2'-O-methyl-guanosine
  modified_base 17: mod_base = OTHER; note = 2'-O-methyl-uridine
  modified_base 18: mod_base = OTHER; note = 2'-O-methyl-cytidine with phosphorothioate linkage
  modified_base 19: mod_base = OTHER; note = 2'-O-methyl-adenosine with phosphorothioate linkage
  modified_base 20: mod_base = OTHER; note = 2'-O-methyl-adenosine conjugated to 3 iterations of (2R,3R,4R,5S)-5-(3-(5-(((2R,3R,4R,5R,6R)- 3-acetamido-4,5-dihydroxy-6-(hydroxymethyl)tetrahydro-2H-py ran-2-yl)oxy)pentanamido)propyl)-2-((hydroxyl)methyl)-4-met hoxytetrahydrofuran-3-oxyl
atgctcaagtcttctgtcaa

SEQ ID NO: 812 - RNA, 20 nt, synthetic construct
  source 1..20: mol_type = other RNA
  modified_base 1: mod_base = OTHER; note = 2'-O-methyl-uridine with phosphorothioate linkage
  modified_base 2: mod_base = OTHER; note = 2'-O-methyl-guanosine with phosphorothioate linkage
  modified_base 3: mod_base = OTHER; note = 2'-O-methyl-cytidine
  modified_base 4: mod_base = OTHER; note = 2'-O-methyl-uridine
  modified_base 5: mod_base = OTHER; note = 2'-O-methyl-cytidine
  modified_base 6: mod_base = OTHER; note = 2'-fluoro-adenosine
  modified_base 7: mod_base = OTHER; note = 2'-O-methyl-adenosine
  modified_base 8: mod_base = OTHER; note = 2'-fluoro-guanosine
  modified_base 9: mod_base = OTHER; note = 2'-fluoro-uridine
  modified_base 10: mod_base = OTHER; note = 2'-fluoro-cytidine
  modified_base 11: mod_base = OTHER; note = 2'-fluoro-uridine
  modified_base 12: mod_base = OTHER; note = 2'-O-methyl-uridine
  modified_base 13: mod_base = OTHER; note = 2'-O-methyl-cytidine
  modified_base 14: mod_base = OTHER; note = 2'-O-methyl-uridine
  modified_base 15: mod_base = OTHER; note = 2'-O-methyl-guanosine
  modified_base 16: mod_base = OTHER; note = 2'-O-methyl-uridine
  modified_base 17: mod_base = OTHER; note = 2'-O-methyl-cytidine
  modified_base 18: mod_base = OTHER; note = 2'-O-methyl-adenosine with phosphorothioate linkage
  modified_base 19: mod_base = OTHER; note = 2'-O-methyl-uridine with phosphorothioate linkage
  modified_base 20: mod_base = OTHER; note = 2'-O-methyl-adenosine conjugated to 3 iterations of (2R,3R,4R,5S)-5-(3-(5-(((2R,3R,4R,5R,6R)- 3-acetamido-4,5-dihydroxy-6-(hydroxymethyl)tetrahydro-2H-py ran-2-yl)oxy)pentanamido)propyl)-2-((hydroxyl)methyl)-4-met hoxytetrahydrofuran-3-oxyl
tgctcaagtcttctgtcata

SEQ ID NO: 813 - RNA, 20 nt, synthetic construct
  source 1..20: mol_type = other RNA
  modified_base 1: mod_base = OTHER; note = 2'-O-methyl-guanosine with phosphorothioate linkage
  modified_base 2: mod_base = OTHER; note = 2'-O-methyl-cytidine with phosphorothioate linkage
  modified_base 3: mod_base = OTHER; note = 2'-O-methyl-uridine
  modified_base 4: mod_base = OTHER; note = 2'-O-methyl-cytidine
  modified_base 5: mod_base = OTHER; note = 2'-O-methyl-adenosine
  modified_base 6: mod_base = OTHER; note = 2'-fluoro-adenosine
  modified_base 7: mod_base = OTHER; note = 2'-O-methyl-guanosine
  modified_base 8: mod_base = OTHER; note = 2'-fluoro-uridine
  modified_base 9: mod_base = OTHER; note = 2'-fluoro-cytidine
  modified_base 10: mod_base = OTHER; note = 2'-fluoro-uridine
  modified_base 11: mod_base = OTHER; note = 2'-fluoro-uridine
  modified_base 12: mod_base = OTHER; note = 2'-O-methyl-cytidine
  modified_base 13: mod_base = OTHER; note = 2'-O-methyl-uridine
  modified_base 14: mod_base = OTHER; note = 2'-O-methyl-guanosine
  modified_base 15: mod_base = OTHER; note = 2'-O-methyl-uridine
  modified_base 16: mod_base = OTHER; note = 2'-O-methyl-cytidine
  modified_base 17: mod_base = OTHER; note = 2'-O-methyl-adenosine
  modified_base 18: mod_base = OTHER; note = 2'-O-methyl-uridine with phosphorothioate linkage
  modified_base 19: mod_base = OTHER; note = 2'-O-methyl-adenosine with phosphorothioate linkage
  modified_base 20: mod_base = OTHER; note = 2'-O-methyl-adenosine conjugated to 3 iterations of (2R,3R,4R,5S)-5-(3-(5-(((2R,3R,4R,5R,6R)- 3-acetamido-4,5-dihydroxy-6-(hydroxymethyl)tetrahydro-2H-py ran-2-yl)oxy)pentanamido)propyl)-2-((hydroxyl)methyl)-4-met hoxytetrahydrofuran-3-oxyl
gctcaagtcttctgtcataa

SEQ ID NO: 814 - RNA, 20 nt, synthetic construct
  source 1..20: mol_type = other RNA
  modified_base 1: mod_base = OTHER; note = 2'-O-methyl-cytidine with phosphorothioate linkage
  modified_base 2: mod_base = OTHER; note = 2'-O-methyl-uridine with phosphorothioate linkage
  modified_base 3: mod_base = OTHER; note = 2'-O-methyl-cytidine
  modified_base 4: mod_base = OTHER; note = 2'-O-methyl-adenosine
  modified_base 5: mod_base = OTHER; note = 2'-O-methyl-adenosine
  modified_base 6: mod_base = OTHER; note = 2'-fluoro-guanosine
  modified_base 7: mod_base = OTHER; note = 2'-O-methyl-uridine
  modified_base 8: mod_base = OTHER; note = 2'-fluoro-cytidine
  modified_base 9: mod_base = OTHER; note = 2'-fluoro-uridine
  modified_base 10: mod_base = OTHER; note = 2'-fluoro-uridine
  modified_base 11: mod_base = OTHER; note = 2'-fluoro-cytidine
  modified_base 12: mod_base = OTHER; note = 2'-O-methyl-uridine
  modified_base 13: mod_base = OTHER; note = 2'-O-methyl-guanosine
  modified_base 14: mod_base = OTHER; note = 2'-O-methyl-uridine
  modified_base 15: mod_base = OTHER; note = 2'-O-methyl-cytidine
  modified_base 16: mod_base = OTHER; note = 2'-O-methyl-adenosine
  modified_base 17: mod_base = OTHER; note = 2'-O-methyl-uridine
  modified_base 18: mod_base = OTHER; note = 2'-O-methyl-adenosine with phosphorothioate linkage
  modified_base 19: mod_base = OTHER; note = 2'-O-methyl-guanosine with phosphorothioate linkage
  modified_base 20: mod_base = OTHER; note = 2'-O-methyl-adenosine conjugated to 3 iterations of (2R,3R,4R,5S)-5-(3-(5-(((2R,3R,4R,5R,6R)- 3-acetamido-4,5-dihydroxy-6-(hydroxymethyl)tetrahydro-2H-py ran-2-yl)oxy)pentanamido)propyl)-2-((hydroxyl)methyl)-4-met hoxytetrahydrofuran-3-oxyl
ctcaagtcttctgtcataga

SEQ ID NO: 815 - RNA, 20 nt, synthetic construct
  source 1..20: mol_type = other RNA
  modified_base 1: mod_base = OTHER; note = 2'-O-methyl-uridine with phosphorothioate linkage
  modified_base 2: mod_base = OTHER; note = 2'-O-methyl-cytidine with phosphorothioate linkage
  modified_base 3: mod_base = OTHER; note = 2'-O-methyl-adenosine
  modified_base 4: mod_base = OTHER; note = 2'-O-methyl-adenosine
  modified_base 5: mod_base = OTHER; note = 2'-O-methyl-guanosine
  modified_base 6: mod_base = OTHER; note = 2'-fluoro-uridine
  modified_base 7: mod_base = OTHER; note = 2'-O-methyl-cytidine
  modified_base 8: mod_base = OTHER; note = 2'-fluoro-uridine
  modified_base 9: mod_base = OTHER; note = 2'-fluoro-uridine
  modified_base 10: mod_base = OTHER; note = 2'-fluoro-cytidine
  modified_base 11: mod_base = OTHER; note = 2'-fluoro-uridine
  modified_base 12: mod_base = OTHER; note = 2'-O-methyl-guanosine
  modified_base 13: mod_base = OTHER; note = 2'-O-methyl-uridine
  modified_base 14: mod_base = OTHER; note = 2'-O-methyl-cytidine
  modified_base 15: mod_base = OTHER; note = 2'-O-methyl-adenosine
  modified_base 16: mod_base = OTHER; note = 2'-O-methyl-uridine
  modified_base 17: mod_base = OTHER; note = 2'-O-methyl-adenosine
  modified_base 18: mod_base = OTHER; note = 2'-O-methyl-guanosine with phosphorothioate linkage
  modified_base 19: mod_base = OTHER; note = 2'-O-methyl-uridine with phosphorothioate linkage
  modified_base 20: mod_base = OTHER; note = 2'-O-methyl-adenosine conjugated to 3 iterations of (2R,3R,4R,5S)-5-(3-(5-(((2R,3R,4R,5R,6R)- 3-acetamido-4,5-dihydroxy-6-(hydroxymethyl)tetrahydro-2H-py ran-2-yl)oxy)pentanamido)propyl)-2-((hydroxyl)methyl)-4-met hoxytetrahydrofuran-3-oxyl
tcaagtcttctgtcatagta

SEQ ID NO: 816 - RNA, 20 nt, synthetic construct
  source 1..20: mol_type = other RNA
  modified_base 1: mod_base = OTHER; note = 2'-O-methyl-cytidine with phosphorothioate linkage
  modified_base 2: mod_base = OTHER; note = 2'-O-methyl-adenosine with phosphorothioate linkage
  modified_base 3: mod_base = OTHER; note = 2'-O-methyl-adenosine
  modified_base 4: mod_base = OTHER; note = 2'-O-methyl-guanosine
  modified_base 5: mod_base = OTHER; note = 2'-O-methyl-uridine
  modified_base 6: mod_base = OTHER; note = 2'-fluoro-cytidine
  modified_base 7: mod_base = OTHER; note = 2'-O-methyl-uridine
  modified_base 8: mod_base = OTHER; note = 2'-fluoro-uridine
  modified_base 9: mod_base = OTHER; note = 2'-fluoro-cytidine
  modified_base 10: mod_base = OTHER; note = 2'-fluoro-uridine
  modified_base 11: mod_base = OTHER; note = 2'-fluoro-guanosine
  modified_base 12: mod_base = OTHER; note = 2'-O-methyl-uridine
  modified_base 13: mod_base = OTHER; note = 2'-O-methyl-cytidine
  modified_base 14: mod_base = OTHER; note = 2'-O-methyl-adenosine
  modified_base 15: mod_base = OTHER; note = 2'-O-methyl-uridine
  modified_base 16: mod_base = OTHER; note = 2'-O-methyl-adenosine
  modified_base 17: mod_base = OTHER; note = 2'-O-methyl-guanosine
  modified_base 18: mod_base = OTHER; note = 2'-O-methyl-uridine with phosphorothioate linkage
  modified_base 19: mod_base = OTHER; note = 2'-O-methyl-uridine with phosphorothioate linkage
  modified_base 20: mod_base = OTHER; note = 2'-O-methyl-adenosine conjugated to 3 iterations of (2R,3R,4R,5S)-5-(3-(5-(((2R,3R,4R,5R,6R)- 3-acetamido-4,5-dihydroxy-6-(hydroxymethyl)tetrahydro-2H-py ran-2-yl)oxy)pentanamido)propyl)-2-((hydroxyl)methyl)-4-met hoxytetrahydrofuran-3-oxyl
caagtcttctgtcatagtta

SEQ ID NO: 817 - RNA, 20 nt, synthetic construct
  source 1..20: mol_type = other RNA
  modified_base 1: mod_base = OTHER; note = 2'-O-methyl-cytidine with phosphorothioate linkage
  modified_base 2: mod_base = OTHER; note = 2'-O-methyl-adenosine with phosphorothioate linkage
  modified_base 3: mod_base = OTHER; note = 2'-O-methyl-uridine
  modified_base 4: mod_base = OTHER; note = 2'-O-methyl-adenosine
  modified_base 5: mod_base = OTHER; note = 2'-O-methyl-guanosine
  modified_base 6: mod_base = OTHER; note = 2'-fluoro-uridine
  modified_base 7: mod_base = OTHER; note = 2'-O-methyl-uridine
  modified_base 8: mod_base = OTHER; note = 2'-fluoro-cytidine
  modified_base 9: mod_base = OTHER; note = 2'-fluoro-cytidine
  modified_base 10: mod_base = OTHER; note = 2'-fluoro-adenosine
  modified_base 11: mod_base = OTHER; note = 2'-fluoro-adenosine
  modified_base 12: mod_base = OTHER; note = 2'-O-methyl-cytidine
  modified_base 13: mod_base = OTHER; note = 2'-O-methyl-adenosine
  modified_base 14: mod_base = OTHER; note = 2'-O-methyl-adenosine
  modified_base 15: mod_base = OTHER; note = 2'-O-methyl-uridine
  modified_base 16: mod_base = OTHER; note = 2'-O-methyl-guanosine
  modified_base 17: mod_base = OTHER; note = 2'-O-methyl-uridine
  modified_base 18: mod_base = OTHER; note = 2'-O-methyl-uridine with phosphorothioate linkage
  modified_base 19: mod_base = OTHER; note = 2'-O-methyl-adenosine with phosphorothioate linkage
  modified_base 20: mod_base = OTHER; note = 2'-O-methyl-adenosine conjugated to 3 iterations of (2R,3R,4R,5S)-5-(3-(5-(((2R,3R,4R,5R,6R)- 3-acetamido-4,5-dihydroxy-6-(hydroxymethyl)tetrahydro-2H-py ran-2-yl)oxy)pentanamido)propyl)-2-((hydroxyl)methyl)-4-met hoxytetrahydrofuran-3-oxyl
catagttccaacaatgttaa

SEQ ID NO: 818 - RNA, 20 nt, synthetic construct
  source 1..20: mol_type = other RNA
  modified_base 1: mod_base = OTHER; note = 2'-O-methyl-adenosine with phosphorothioate linkage
  modified_base 2: mod_base = OTHER; note = 2'-O-methyl-uridine with phosphorothioate linkage
  modified_base 3: mod_base = OTHER; note = 2'-O-methyl-adenosine
  modified_base 4: mod_base = OTHER; note = 2'-O-methyl-guanosine
  modified_base 5: mod_base = OTHER; note = 2'-O-methyl-uridine
  modified_base 6: mod_base = OTHER; note = 2'-fluoro-uridine
  modified_base 7: mod_base = OTHER; note = 2'-O-methyl-cytidine
  modified_base 8: mod_base = OTHER; note = 2'-fluoro-cytidine
  modified_base 9: mod_base = OTHER; note = 2'-fluoro-adenosine
  modified_base 10: mod_base = OTHER; note = 2'-fluoro-adenosine
  modified_base 11: mod_base = OTHER; note = 2'-fluoro-cytidine
  modified_base 12: mod_base = OTHER; note = 2'-O-methyl-adenosine
  modified_base 13: mod_base = OTHER; note = 2'-O-methyl-adenosine
  modified_base 14: mod_base = OTHER; note = 2'-O-methyl-uridine
  modified_base 15: mod_base = OTHER; note = 2'-O-methyl-guanosine
  modified_base 16: mod_base = OTHER; note = 2'-O-methyl-uridine
  modified_base 17: mod_base = OTHER; note = 2'-O-methyl-uridine
  modified_base 18: mod_base = OTHER; note = 2'-O-methyl-adenosine with phosphorothioate linkage
  modified_base 19: mod_base = OTHER; note = 2'-O-methyl-cytidine with phosphorothioate linkage
  modified_base 20: mod_base = OTHER; note = 2'-O-methyl-adenosine conjugated to 3 iterations of (2R,3R,4R,5S)-5-(3-(5-(((2R,3R,4R,5R,6R)- 3-acetamido-4,5-dihydroxy-6-(hydroxymethyl)tetrahydro-2H-py ran-2-yl)oxy)pentanamido)propyl)-2-((hydroxyl)methyl)-4-met hoxytetrahydrofuran-3-oxyl
atagttccaacaatgttaca

SEQ ID NO: 819 - RNA, 20 nt, synthetic construct
  source 1..20: mol_type = other RNA
  modified_base 1: mod_base = OTHER; note = 2'-O-methyl-uridine with phosphorothioate linkage
  modified_base 2: mod_base = OTHER; note = 2'-O-methyl-adenosine with phosphorothioate linkage
  modified_base 3: mod_base = OTHER; note = 2'-O-methyl-guanosine
  modified_base 4: mod_base = OTHER; note = 2'-O-methyl-uridine
  modified_base 5: mod_base = OTHER; note = 2'-O-methyl-uridine
  modified_base 6: mod_base = OTHER; note = 2'-fluoro-cytidine
  modified_base 7: mod_base = OTHER; note = 2'-O-methyl-cytidine
  modified_base 8: mod_base = OTHER; note = 2'-fluoro-adenosine
  modified_base 9: mod_base = OTHER; note = 2'-fluoro-adenosine
  modified_base 10: mod_base = OTHER; note = 2'-fluoro-cytidine
  modified_base 11: mod_base = OTHER; note = 2'-fluoro-adenosine
  modified_base 12: mod_base = OTHER; note = 2'-O-methyl-adenosine
  modified_base 13: mod_base = OTHER; note = 2'-O-methyl-uridine
  modified_base 14: mod_base = OTHER; note = 2'-O-methyl-guanosine
  modified_base 15: mod_base = OTHER; note = 2'-O-methyl-uridine
  modified_base 16: mod_base = OTHER; note = 2'-O-methyl-uridine
  modified_base 17: mod_base = OTHER; note = 2'-O-methyl-adenosine
  modified_base 18: mod_base = OTHER; note = 2'-O-methyl-cytidine with phosphorothioate linkage
  modified_base 19: mod_base = OTHER; note = 2'-O-methyl-cytidine with phosphorothioate linkage
  modified_base 20: mod_base = OTHER; note = 2'-O-methyl-adenosine conjugated to 3 iterations of (2R,3R,4R,5S)-5-(3-(5-(((2R,3R,4R,5R,6R)- 3-acetamido-4,5-dihydroxy-6-(hydroxymethyl)tetrahydro-2H-py ran-2-yl)oxy)pentanamido)propyl)-2-((hydroxyl)methyl)-4-met hoxytetrahydrofuran-3-oxyl
tagttccaacaatgttacca

SEQ ID NO: 820 - RNA, 20 nt, synthetic construct
  source 1..20: mol_type = other RNA
  modified_base 1: mod_base = OTHER; note = 2'-O-methyl-adenosine with phosphorothioate linkage
  modified_base 2: mod_base = OTHER; note = 2'-O-methyl-guanosine with phosphorothioate linkage
  modified_base 3: mod_base = OTHER; note = 2'-O-methyl-uridine
  modified_base 4: mod_base = OTHER; note = 2'-O-methyl-uridine
  modified_base 5: mod_base = OTHER; note = 2'-O-methyl-cytidine
  modified_base 6: mod_base = OTHER; note = 2'-fluoro-cytidine
  modified_base 7: mod_base = OTHER; note = 2'-O-methyl-adenosine
  modified_base 8: mod_base = OTHER; note = 2'-fluoro-adenosine
  modified_base 9: mod_base = OTHER; note = 2'-fluoro-cytidine
  modified_base 10: mod_base = OTHER; note = 2'-fluoro-adenosine
  modified_base 11: mod_base = OTHER; note = 2'-fluoro-adenosine
  modified_base 12: mod_base = OTHER; note = 2'-O-methyl-uridine
  modified_base 13: mod_base = OTHER; note = 2'-O-methyl-guanosine
  modified_base 14: mod_base = OTHER; note = 2'-O-methyl-uridine
  modified_base 15: mod_base = OTHER; note = 2'-O-methyl-uridine
  modified_base 16: mod_base = OTHER; note = 2'-O-methyl-adenosine
  modified_base 17: mod_base = OTHER; note = 2'-O-methyl-cytidine
  modified_base 18: mod_base = OTHER; note = 2'-O-methyl-cytidine with phosphorothioate linkage
  modified_base 19: mod_base = OTHER; note = 2'-O-methyl-adenosine with phosphorothioate linkage
  modified_base 20: mod_base = OTHER; note = 2'-O-methyl-adenosine conjugated to 3 iterations of (2R,3R,4R,5S)-5-(3-(5-(((2R,3R,4R,5R,6R)- 3-acetamido-4,5-dihydroxy-6-(hydroxymethyl)tetrahydro-2H-py ran-2-yl)oxy)pentanamido)propyl)-2-((hydroxyl)methyl)-4-met hoxytetrahydrofuran-3-oxyl
agttccaacaatgttaccaa

SEQ ID NO: 821 - RNA, 20 nt, synthetic construct
  source 1..20: mol_type = other RNA
  modified_base 1: mod_base = OTHER; note = 2'-O-methyl-guanosine with phosphorothioate linkage
  modified_base 2: mod_base = OTHER; note = 2'-O-methyl-uridine with phosphorothioate linkage
  modified_base 3: mod_base = OTHER; note = 2'-O-methyl-uridine
  modified_base 4: mod_base = OTHER; note = 2'-O-methyl-cytidine
  modified_base 5: mod_base = OTHER; note = 2'-O-methyl-cytidine
  modified_base 6: mod_base = OTHER; note = 2'-fluoro-adenosine
  modified_base 7: mod_base = OTHER; note = 2'-O-methyl-adenosine
  modified_base 8: mod_base = OTHER; note = 2'-fluoro-cytidine
  modified_base 9: mod_base = OTHER; note = 2'-fluoro-adenosine
  modified_base 10: mod_base = OTHER; note = 2'-fluoro-adenosine
  modified_base 11: mod_base = OTHER; note = 2'-fluoro-uridine
  modified_base 12: mod_base = OTHER; note = 2'-O-methyl-guanosine
  modified_base 13: mod_base = OTHER; note = 2'-O-methyl-uridine
  modified_base 14: mod_base = OTHER; note = 2'-O-methyl-uridine
  modified_base 15: mod_base = OTHER; note = 2'-O-methyl-adenosine
  modified_base 16: mod_base = OTHER; note = 2'-O-methyl-cytidine
  modified_base 17: mod_base = OTHER; note = 2'-O-methyl-cytidine
  modified_base 18: mod_base = OTHER; note = 2'-O-methyl-adenosine with phosphorothioate linkage
  modified_base 19: mod_base = OTHER; note = 2'-O-methyl-adenosine with phosphorothioate linkage
  modified_base 20: mod_base = OTHER; note = 2'-O-methyl-adenosine conjugated to 3 iterations of (2R,3R,4R,5S)-5-(3-(5-(((2R,3R,4R,5R,6R)- 3-acetamido-4,5-dihydroxy-6-(hydroxymethyl)tetrahydro-2H-py ran-2-yl)oxy)pentanamido)propyl)-2-((hydroxyl)methyl)-4-met hoxytetrahydrofuran-3-oxyl
gttccaacaatgttaccaaa

SEQ ID NO: 822 - RNA, 20 nt, synthetic construct
  source 1..20: mol_type = other RNA
  modified_base 1: mod_base = OTHER; note = 2'-O-methyl-uridine with phosphorothioate linkage
  modified_base 2: mod_base = OTHER; note = 2'-O-methyl-uridine with phosphorothioate linkage
  modified_base 3: mod_base = OTHER; note = 2'-O-methyl-cytidine
  modified_base 4: mod_base = OTHER; note = 2'-O-methyl-cytidine
  modified_base 5: mod_base = OTHER; note = 2'-O-methyl-adenosine
  modified_base 6: mod_base = OTHER; note = 2'-fluoro-adenosine
  modified_base 7: mod_base = OTHER; note = 2'-O-methyl-cytidine
  modified_base 8: mod_base = OTHER; note = 2'-fluoro-adenosine
  modified_base 9: mod_base = OTHER; note = 2'-fluoro-adenosine
  modified_base 10: mod_base = OTHER; note = 2'-fluoro-uridine
  modified_base 11: mod_base = OTHER; note = 2'-fluoro-guanosine
  modified_base 12: mod_base = OTHER; note = 2'-O-methyl-uridine
  modified_base 13: mod_base = OTHER; note = 2'-O-methyl-uridine
  modified_base 14: mod_base = OTHER; note = 2'-O-methyl-adenosine
  modified_base 15: mod_base = OTHER; note = 2'-O-methyl-cytidine
  modified_base 16: mod_base = OTHER; note = 2'-O-methyl-cytidine
  modified_base 17: mod_base = OTHER; note = 2'-O-methyl-adenosine
  modified_base 18: mod_base = OTHER; note = 2'-O-methyl-adenosine with phosphorothioate linkage
  modified_base 19: mod_base = OTHER; note = 2'-O-methyl-adenosine with phosphorothioate linkage
  modified_base 20: mod_base = OTHER; note = 2'-O-methyl-adenosine conjugated to 3 iterations of (2R,3R,4R,5S)-5-(3-(5-(((2R,3R,4R,5R,6R)- 3-acetamido-4,5-dihydroxy-6-(hydroxymethyl)tetrahydro-2H-py ran-2-yl)oxy)pentanamido)propyl)-2-((hydroxyl)methyl)-4-met hoxytetrahydrofuran-3-oxyl
ttccaacaatgttaccaaaa

SEQ ID NO: 823 - RNA, 20 nt, synthetic construct
  source 1..20: mol_type = other RNA
  modified_base 1: mod_base = OTHER; note = 2'-O-methyl-uridine with phosphorothioate linkage
  modified_base 2: mod_base = OTHER; note = 2'-O-methyl-cytidine with phosphorothioate linkage
  modified_base 3: mod_base = OTHER; note = 2'-O-methyl-cytidine
  modified_base 4: mod_base = OTHER; note = 2'-O-methyl-adenosine
  modified_base 5: mod_base = OTHER; note = 2'-O-methyl-adenosine
  modified_base 6: mod_base = OTHER; note = 2'-fluoro-cytidine
  modified_base 7: mod_base = OTHER; note = 2'-O-methyl-adenosine
  modified_base 8: mod_base = OTHER; note = 2'-fluoro-adenosine
  modified_base 9: mod_base = OTHER; note = 2'-fluoro-uridine
  modified_base 10: mod_base = OTHER; note = 2'-fluoro-guanosine
  modified_base 11: mod_base = OTHER; note = 2'-fluoro-uridine
  modified_base 12: mod_base = OTHER; note = 2'-O-methyl-uridine
  modified_base 13: mod_base = OTHER; note = 2'-O-methyl-adenosine
  modified_base 14: mod_base = OTHER; note = 2'-O-methyl-cytidine
  modified_base 15: mod_base = OTHER; note = 2'-O-methyl-cytidine
  modified_base 16: mod_base = OTHER; note = 2'-O-methyl-adenosine
  modified_base 17: mod_base = OTHER; note = 2'-O-methyl-adenosine
  modified_base 18: mod_base = OTHER; note = 2'-O-methyl-adenosine with phosphorothioate linkage
  modified_base 19: mod_base = OTHER; note = 2'-O-methyl-adenosine with phosphorothioate linkage
  modified_base 20: mod_base = OTHER; note = 2'-O-methyl-adenosine conjugated to 3 iterations of (2R,3R,4R,5S)-5-(3-(5-(((2R,3R,4R,5R,6R)- 3-acetamido-4,5-dihydroxy-6-(hydroxymethyl)tetrahydro-2H-py ran-2-yl)oxy)pentanamido)propyl)-2-((hydroxyl)methyl)-4-met hoxytetrahydrofuran-3-oxyl
tccaacaatgttaccaaaaa

SEQ ID NO: 824 - RNA, 20 nt, synthetic construct
  source 1..20: mol_type = other RNA
  modified_base 1: mod_base = OTHER; note = 2'-O-methyl-cytidine with phosphorothioate linkage
  modified_base 2: mod_base = OTHER; note = 2'-O-methyl-adenosine with phosphorothioate linkage
  modified_base 3: mod_base = OTHER; note = 2'-O-methyl-adenosine
  modified_base 4: mod_base = OTHER; note = 2'-O-methyl-cytidine
  modified_base 5: mod_base = OTHER; note = 2'-O-methyl-adenosine
  modified_base 6: mod_base = OTHER; note = 2'-fluoro-adenosine
  modified_base 7: mod_base = OTHER; note = 2'-O-methyl-uridine
  modified_base 8: mod_base = OTHER; note = 2'-fluoro-guanosine
  modified_base 9: mod_base = OTHER; note = 2'-fluoro-uridine
  modified_base 10: mod_base = OTHER; note = 2'-fluoro-uridine
  modified_base 11: mod_base = OTHER; note = 2'-fluoro-adenosine
  modified_base 12: mod_base = OTHER; note = 2'-O-methyl-cytidine
  modified_base 13: mod_base = OTHER; note = 2'-O-methyl-cytidine
  modified_base 14: mod_base = OTHER; note = 2'-O-methyl-adenosine
  modified_base 15: mod_base = OTHER; note = 2'-O-methyl-adenosine
  modified_base 16: mod_base = OTHER; note = 2'-O-methyl-adenosine
  modified_base 17: mod_base = OTHER; note = 2'-O-methyl-adenosine
  modified_base 18: mod_base = OTHER; note = 2'-O-methyl-cytidine with phosphorothioate linkage
  modified_base 19: mod_base = OTHER; note = 2'-O-methyl-cytidine with phosphorothioate linkage
  modified_base 20: mod_base = OTHER; note = 2'-O-methyl-adenosine conjugated to 3 iterations of (2R,3R,4R,5S)-5-(3-(5-(((2R,3R,4R,5R,6R)- 3-acetamido-4,5-dihydroxy-6-(hydroxymethyl)tetrahydro-2H-py ran-2-yl)oxy)pentanamido)propyl)-2-((hydroxyl)methyl)-4-met hoxytetrahydrofuran-3-oxyl
caacaatgttaccaaaacca

SEQ ID NO: 825 - RNA, 20 nt, synthetic construct
  source 1..20: mol_type = other RNA
  modified_base 1: mod_base = OTHER; note = 2'-O-methyl-adenosine with phosphorothioate linkage
  modified_base 2: mod_base = OTHER; note = 2'-O-methyl-cytidine with phosphorothioate linkage
  modified_base 3: mod_base = OTHER; note = 2'-O-methyl-adenosine
  modified_base 4: mod_base = OTHER; note = 2'-O-methyl-adenosine
  modified_base 5: mod_base = OTHER; note = 2'-O-methyl-uridine
  modified_base 6: mod_base = OTHER; note = 2'-fluoro-guanosine
  modified_base 7: mod_base = OTHER; note = 2'-O-methyl-uridine
  modified_base 8: mod_base = OTHER; note = 2'-fluoro-uridine
  modified_base 9: mod_base = OTHER; note = 2'-fluoro-adenosine
  modified_base 10: mod_base = OTHER; note = 2'-fluoro-cytidine
  modified_base 11: mod_base = OTHER; note = 2'-fluoro-cytidine
  modified_base 12: mod_base = OTHER; note = 2'-O-methyl-adenosine
  modified_base 13: mod_base = OTHER; note = 2'-O-methyl-adenosine
  modified_base 14: mod_base = OTHER; note = 2'-O-methyl-adenosine
  modified_base 15: mod_base = OTHER; note = 2'-O-methyl-adenosine
  modified_base 16: mod_base = OTHER; note = 2'-O-methyl-cytidine
  modified_base 17: mod_base = OTHER; note = 2'-O-methyl-cytidine
  modified_base 18: mod_base = OTHER; note = 2'-O-methyl-guanosine with phosphorothioate linkage
  modified_base 19: mod_base = OTHER; note = 2'-O-methyl-adenosine with phosphorothioate linkage
  modified_base 20: mod_base = OTHER; note = 2'-O-methyl-adenosine conjugated to 3 iterations of (2R,3R,4R,5S)-5-(3-(5-(((2R,3R,4R,5R,6R)- 3-acetamido-4,5-dihydroxy-6-(hydroxymethyl)tetrahydro-2H-py ran-2-yl)oxy)pentanamido)propyl)-2-((hydroxyl)methyl)-4-met hoxytetrahydrofuran-3-oxyl
acaatgttaccaaaaccgaa

SEQ ID NO: 826 - RNA, 20 nt, synthetic construct
  source 1..20: mol_type = other RNA
  modified_base 1: mod_base = OTHER; note = 2'-O-methyl-adenosine with phosphorothioate linkage
  modified_base 2: mod_base = OTHER; note = 2'-O-methyl-adenosine with phosphorothioate linkage
  modified_base 3: mod_base = OTHER; note = 2'-O-methyl-uridine
  modified_base 4: mod_base = OTHER; note = 2'-O-methyl-guanosine
  modified_base 5: mod_base = OTHER; note = 2'-O-methyl-uridine
  modified_base 6: mod_base = OTHER; note = 2'-fluoro-uridine
  modified_base 7: mod_base = OTHER; note = 2'-O-methyl-adenosine
  modified_base 8: mod_base = OTHER; note = 2'-fluoro-cytidine
  modified_base 9: mod_base = OTHER; note = 2'-fluoro-cytidine
  modified_base 10: mod_base = OTHER; note = 2'-fluoro-adenosine
  modified_base 11: mod_base = OTHER; note = 2'-fluoro-adenosine
  modified_base 12: mod_base = OTHER; note = 2'-O-methyl-adenosine
  modified_base 13: mod_base = OTHER; note = 2'-O-methyl-adenosine
  modified_base 14: mod_base = OTHER; note = 2'-O-methyl-cytidine
  modified_base 15: mod_base = OTHER; note = 2'-O-methyl-cytidine
  modified_base 16: mod_base = OTHER; note = 2'-O-methyl-guanosine
  modified_base 17: mod_base = OTHER; note = 2'-O-methyl-adenosine
  modified_base 18: mod_base = OTHER; note = 2'-O-methyl-adenosine with phosphorothioate linkage
  modified_base 19: mod_base = OTHER; note = 2'-O-methyl-uridine with phosphorothioate linkage
  modified_base 20: mod_base = OTHER; note = 2'-O-methyl-adenosine conjugated to 3 iterations of (2R,3R,4R,5S)-5-(3-(5-(((2R,3R,4R,5R,6R)- 3-acetamido-4,5-dihydroxy-6-(hydroxymethyl)tetrahydro-2H-py ran-2-yl)oxy)pentanamido)propyl)-2-((hydroxyl)methyl)-4-met hoxytetrahydrofuran-3-oxyl
aatgttaccaaaaccgaata

SEQ ID NO: 827 - RNA, 20 nt, synthetic construct
  source 1..20: mol_type = other RNA
  modified_base 1: mod_base = OTHER; note = 2'-O-methyl-uridine with phosphorothioate linkage
  modified_base 2: mod_base = OTHER; note = 2'-O-methyl-guanosine with phosphorothioate linkage
  modified_base 3: mod_base = OTHER; note = 2'-O-methyl-uridine
  modified_base 4: mod_base = OTHER; note = 2'-O-methyl-uridine
  modified_base 5: mod_base = OTHER; note = 2'-O-methyl-adenosine
  modified_base 6: mod_base = OTHER; note = 2'-fluoro-cytidine
  modified_base 7: mod_base = OTHER; note = 2'-O-methyl-cytidine
  modified_base 8: mod_base = OTHER; note = 2'-fluoro-adenosine
  modified_base 9: mod_base = OTHER; note = 2'-fluoro-adenosine
  modified_base 10: mod_base = OTHER; note = 2'-fluoro-adenosine
  modified_base 11: mod_base = OTHER; note = 2'-fluoro-adenosine
  modified_base 12: mod_base = OTHER; note = 2'-O-methyl-cytidine
  modified_base 13: mod_base = OTHER; note = 2'-O-methyl-cytidine
  modified_base 14: mod_base = OTHER; note = 2'-O-methyl-guanosine
  modified_base 15: mod_base = OTHER; note = 2'-O-methyl-adenosine
  modified_base 16: mod_base = OTHER; note = 2'-O-methyl-adenosine
  modified_base 17: mod_base = OTHER; note = 2'-O-methyl-uridine
  modified_base 18: mod_base = OTHER; note = 2'-O-methyl-guanosine with phosphorothioate linkage
  modified_base 19: mod_base = OTHER; note = 2'-O-methyl-cytidine with phosphorothioate linkage
  modified_base 20: mod_base = OTHER; note = 2'-O-methyl-adenosine conjugated to 3 iterations of (2R,3R,4R,5S)-5-(3-(5-(((2R,3R,4R,5R,6R)- 3-acetamido-4,5-dihydroxy-6-(hydroxymethyl)tetrahydro-2H-py ran-2-yl)oxy)pentanamido)propyl)-2-((hydroxyl)methyl)-4-met hoxytetrahydrofuran-3-oxyl
tgttaccaaaaccgaatgca

SEQ ID NO: 828 - RNA, 20 nt, synthetic construct
  source 1..20: mol_type = other RNA
  modified_base 1: mod_base = OTHER; note = 2'-O-methyl-uridine with phosphorothioate linkage
  modified_base 2: mod_base = OTHER; note = 2'-O-methyl-uridine with phosphorothioate linkage
  modified_base 3: mod_base = OTHER; note = 2'-O-methyl-adenosine
  modified_base 4: mod_base = OTHER; note = 2'-O-methyl-cytidine
  modified_base 5: mod_base = OTHER; note = 2'-O-methyl-cytidine
  modified_base 6: mod_base = OTHER; note = 2'-fluoro-adenosine
  modified_base 7: mod_base = OTHER; note = 2'-O-methyl-adenosine
  modified_base 8: mod_base = OTHER; note = 2'-fluoro-adenosine
  modified_base 9: mod_base = OTHER; note = 2'-fluoro-adenosine
  modified_base 10: mod_base = OTHER; note = 2'-fluoro-cytidine
  modified_base 11: mod_base = OTHER; note = 2'-fluoro-cytidine
  modified_base 12: mod_base = OTHER; note = 2'-O-methyl-guanosine
  modified_base 13: mod_base = OTHER; note = 2'-O-methyl-adenosine
  modified_base 14: mod_base = OTHER; note = 2'-O-methyl-adenosine
  modified_base 15: mod_base = OTHER; note = 2'-O-methyl-uridine
  modified_base 16: mod_base = OTHER; note = 2'-O-methyl-guanosine
  modified_base 17: mod_base = OTHER; note = 2'-O-methyl-cytidine
  modified_base 18: mod_base = OTHER; note = 2'-O-methyl-uridine with phosphorothioate linkage
  modified_base 19: mod_base = OTHER; note = 2'-O-methyl-guanosine with phosphorothioate linkage
  modified_base 20: mod_base = OTHER; note = 2'-O-methyl-adenosine conjugated to 3 iterations of (2R,3R,4R,5S)-5-(3-(5-(((2R,3R,4R,5R,6R)- 3-acetamido-4,5-dihydroxy-6-(hydroxymethyl)tetrahydro-2H-py ran-2-yl)oxy)pentanamido)propyl)-2-((hydroxyl)methyl)-4-met hoxytetrahydrofuran-3-oxyl
ttaccaaaaccgaatgctga

SEQ ID NO: 829 - RNA, 20 nt, synthetic construct
  source 1..20: mol_type = other RNA
  modified_base 1: mod_base = OTHER; note = 2'-O-methyl-uridine with phosphorothioate linkage
  modified_base 2: mod_base = OTHER; note = 2'-O-methyl-guanosine with phosphorothioate linkage
  modified_base 3: mod_base = OTHER; note = 2'-O-methyl-guanosine
  modified_base 4: mod_base = OTHER; note = 2'-O-methyl-adenosine
  modified_base 5: mod_base = OTHER; note = 2'-O-methyl-adenosine
  modified_base 6: mod_base = OTHER; note = 2'-fluoro-cytidine
  modified_base 7: mod_base = OTHER; note = 2'-O-methyl-uridine
  modified_base 8: mod_base = OTHER; note = 2'-fluoro-uridine
  modified_base 9: mod_base = OTHER; note = 2'-fluoro-guanosine
  modified_base 10: mod_base = OTHER; note = 2'-fluoro-guanosine
  modified_base 11: mod_base = OTHER; note = 2'-fluoro-adenosine
  modified_base 12: mod_base = OTHER; note = 2'-O-methyl-cytidine
  modified_base 13: mod_base = OTHER; note = 2'-O-methyl-uridine
  modified_base 14: mod_base = OTHER; note = 2'-O-methyl-cytidine
  modified_base 15: mod_base = OTHER; note = 2'-O-methyl-adenosine
  modified_base 16: mod_base = OTHER; note = 2'-O-methyl-adenosine
  modified_base 17: mod_base = OTHER; note = 2'-O-methyl-cytidine
  modified_base 18: mod_base = OTHER; note = 2'-O-methyl-uridine with phosphorothioate linkage
  modified_base 19: mod_base = OTHER; note = 2'-O-methyl-uridine with phosphorothioate linkage
  modified_base 20: mod_base = OTHER; note = 2'-O-methyl-adenosine conjugated to 3 iterations of (2R,3R,4R,5S)-5-(3-(5-(((2R,3R,4R,5R,6R)- 3-acetamido-4,5-dihydroxy-6-(hydroxymethyl)tetrahydro-2H-py ran-2-yl)oxy)pentanamido)propyl)-2-((hydroxyl)methyl)-4-met hoxytetrahydrofuran-3-oxyl
tggaacttggactcaactta

SEQ ID NO: 830 - RNA, 20 nt, synthetic construct
  source 1..20: mol_type = other RNA
  modified_base 1: mod_base = OTHER; note = 2'-O-methyl-guanosine with phosphorothioate linkage
  modified_base 2: mod_base = OTHER; note = 2'-O-methyl-adenosine with phosphorothioate linkage
  modified_base 3: mod_base = OTHER; note = 2'-O-methyl-adenosine
  modified_base 4: mod_base = OTHER; note = 2'-O-methyl-cytidine
  modified_base 5: mod_base = OTHER; note = 2'-O-methyl-uridine
  modified_base 6: mod_base = OTHER; note = 2'-fluoro-uridine
  modified_base 7: mod_base = OTHER; note = 2'-O-methyl-guanosine
  modified_base 8: mod_base = OTHER; note = 2'-fluoro-guanosine
  modified_base 9: mod_base = OTHER; note = 2'-fluoro-adenosine
  modified_base 10: mod_base = OTHER; note = 2'-fluoro-cytidine
  modified_base 11: mod_base = OTHER; note = 2'-fluoro-uridine
  modified_base 12: mod_base = OTHER; note = 2'-O-methyl-cytidine
  modified_base 13: mod_base = OTHER; note = 2'-O-methyl-adenosine
  modified_base 14: mod_base = OTHER; note = 2'-O-methyl-adenosine
  modified_base 15: mod_base = OTHER; note = 2'-O-methyl-cytidine
  modified_base 16: mod_base = OTHER; note = 2'-O-methyl-uridine
  modified_base 17: mod_base = OTHER; note = 2'-O-methyl-uridine
  modified_base 18: mod_base = OTHER; note = 2'-O-methyl-uridine with phosphorothioate linkage
  modified_base 19: mod_base = OTHER; note = 2'-O-methyl-guanosine with phosphorothioate linkage
  modified_base 20: mod_base = OTHER; note = 2'-O-methyl-adenosine conjugated to 3 iterations of (2R,3R,4R,5S)-5-(3-(5-(((2R,3R,4R,5R,6R)- 3-acetamido-4,5-dihydroxy-6-(hydroxymethyl)tetrahydro-2H-py ran-2-yl)oxy)pentanamido)propyl)-2-((hydroxyl)methyl)-4-met hoxytetrahydrofuran-3-oxyl
gaacttggactcaactttga

SEQ ID NO: 831 - RNA, 20 nt, synthetic construct
  source 1..20: mol_type = other RNA
  modified_base 1: mod_base = OTHER; note = 2'-O-methyl-adenosine with phosphorothioate linkage
  modified_base 2: mod_base = OTHER; note = 2'-O-methyl-cytidine with phosphorothioate linkage
  modified_base 3: mod_base = OTHER; note = 2'-O-methyl-uridine
  modified_base 4: mod_base = OTHER; note = 2'-O-methyl-uridine
  modified_base 5: mod_base = OTHER; note = 2'-O-methyl-guanosine
  modified_base 6: mod_base = OTHER; note = 2'-fluoro-guanosine
  modified_base 7: mod_base = OTHER; note = 2'-O-methyl-adenosine
  modified_base 8: mod_base = OTHER; note = 2'-fluoro-cytidine
  modified_base 9: mod_base = OTHER; note = 2'-fluoro-uridine
  modified_base 10: mod_base = OTHER; note = 2'-fluoro-cytidine
  modified_base 11: mod_base = OTHER; note = 2'-fluoro-adenosine
  modified_base 12: mod_base = OTHER; note = 2'-O-methyl-adenosine
  modified_base 13: mod_base = OTHER; note = 2'-O-methyl-cytidine
  modified_base 14: mod_base = OTHER; note = 2'-O-methyl-uridine
  modified_base 15: mod_base = OTHER; note = 2'-O-methyl-uridine
  modified_base 16: mod_base = OTHER; note = 2'-O-methyl-uridine
  modified_base 17: mod_base = OTHER; note = 2'-O-methyl-guanosine
  modified_base 18: mod_base = OTHER; note = 2'-O-methyl-guanosine with phosphorothioate linkage
  modified_base 19: mod_base = OTHER; note = 2'-O-methyl-cytidine with phosphorothioate linkage
  modified_base 20: mod_base = OTHER; note = 2'-O-methyl-adenosine conjugated to 3 iterations of (2R,3R,4R,5S)-5-(3-(5-(((2R,3R,4R,5R,6R)- 3-acetamido-4,5-dihydroxy-6-(hydroxymethyl)tetrahydro-2H-py ran-2-yl)oxy)pentanamido)propyl)-2-((hydroxyl)methyl)-4-met hoxytetrahydrofuran-3-oxyl
acttggactcaactttggca

SEQ ID NO: 832 - RNA, 20 nt, synthetic construct
  source 1..20: mol_type = other RNA
  modified_base 1: mod_base = OTHER; note = 2'-O-methyl-uridine with phosphorothioate linkage
  modified_base 2: mod_base = OTHER; note = 2'-O-methyl-uridine with phosphorothioate linkage
  modified_base 3: mod_base = OTHER; note = 2'-O-methyl-guanosine
  modified_base 4: mod_base = OTHER; note = 2'-O-methyl-guanosine
  modified_base 5: mod_base = OTHER; note = 2'-O-methyl-adenosine
  modified_base 6: mod_base = OTHER; note = 2'-fluoro-cytidine
  modified_base 7: mod_base = OTHER; note = 2'-O-methyl-uridine
  modified_base 8: mod_base = OTHER; note = 2'-fluoro-cytidine
  modified_base 9: mod_base = OTHER; note = 2'-fluoro-adenosine
  modified_base 10: mod_base = OTHER; note = 2'-fluoro-adenosine
  modified_base 11: mod_base = OTHER; note = 2'-fluoro-cytidine
  modified_base 12: mod_base = OTHER; note = 2'-O-methyl-uridine
  modified_base 13: mod_base = OTHER; note = 2'-O-methyl-uridine
  modified_base 14: mod_base = OTHER; note = 2'-O-methyl-uridine
  modified_base 15: mod_base = OTHER; note = 2'-O-methyl-guanosine
  modified_base 16: mod_base = OTHER; note = 2'-O-methyl-guanosine
  modified_base 17: mod_base = OTHER; note = 2'-O-methyl-cytidine
  modified_base 18: mod_base = OTHER; note = 2'-O-methyl-uridine with phosphorothioate linkage
  modified_base 19: mod_base = OTHER; note = 2'-O-methyl-guanosine with phosphorothioate linkage
  modified_base 20: mod_base = OTHER; note = 2'-O-methyl-adenosine conjugated to 3 iterations of (2R,3R,4R,5S)-5-(3-(5-(((2R,3R,4R,5R,6R)- 3-acetamido-4,5-dihydroxy-6-(hydroxymethyl)tetrahydro-2H-py ran-2-yl)oxy)pentanamido)propyl)-2-((hydroxyl)methyl)-4-met hoxytetrahydrofuran-3-oxyl
ttggactcaactttggctga

SEQ ID NO: 833 - RNA, 20 nt, synthetic construct
  source 1..20: mol_type = other RNA
  modified_base 1: mod_base = OTHER; note = 2'-O-methyl-guanosine with phosphorothioate linkage
  modified_base 2: mod_base = OTHER; note = 2'-O-methyl-guanosine with phosphorothioate linkage
  modified_base 3: mod_base = OTHER; note = 2'-O-methyl-adenosine
  modified_base 4: mod_base = OTHER; note = 2'-O-methyl-cytidine
  modified_base 5: mod_base = OTHER; note = 2'-O-methyl-uridine
  modified_base 6: mod_base = OTHER; note = 2'-fluoro-cytidine
  modified_base 7: mod_base = OTHER; note = 2'-O-methyl-adenosine
  modified_base 8: mod_base = OTHER; note = 2'-fluoro-adenosine
  modified_base 9: mod_base = OTHER; note = 2'-fluoro-cytidine
  modified_base 10: mod_base = OTHER; note = 2'-fluoro-uridine
  modified_base 11: mod_base = OTHER; note = 2'-fluoro-uridine
  modified_base 12: mod_base = OTHER; note = 2'-O-methyl-uridine
  modified_base 13: mod_base = OTHER; note = 2'-O-methyl-guanosine
  modified_base 14: mod_base = OTHER; note = 2'-O-methyl-guanosine
  modified_base 15: mod_base = OTHER; note = 2'-O-methyl-cytidine
  modified_base 16: mod_base = OTHER; note = 2'-O-methyl-uridine
  modified_base 17: mod_base = OTHER; note = 2'-O-methyl-guanosine
  modified_base 18: mod_base = OTHER; note = 2'-O-methyl-guanosine with phosphorothioate linkage
  modified_base 19: mod_base = OTHER; note = 2'-O-methyl-uridine with phosphorothioate linkage
  modified_base 20: mod_base = OTHER; note = 2'-O-methyl-adenosine conjugated to 3 iterations of (2R,3R,4R,5S)-5-(3-(5-(((2R,3R,4R,5R,6R)- 3-acetamido-4,5-dihydroxy-6-(hydroxymethyl)tetrahydro-2H-py ran-2-yl)oxy)pentanamido)propyl)-2-((hydroxyl)methyl)-4-met hoxytetrahydrofuran-3-oxyl
ggactcaactttggctggta

SEQ ID NO: 834 - RNA, 20 nt, synthetic construct
  source 1..20: mol_type = other RNA
  modified_base 1: mod_base = OTHER; note = 2'-O-methyl-adenosine with phosphorothioate linkage
  modified_base 2: mod_base = OTHER; note = 2'-O-methyl-cytidine with phosphorothioate linkage
  modified_base 3: mod_base = OTHER; note = 2'-O-methyl-uridine
  modified_base 4: mod_base = OTHER; note = 2'-O-methyl-cytidine
  modified_base 5: mod_base = OTHER; note = 2'-O-methyl-adenosine
  modified_base 6: mod_base = OTHER; note = 2'-fluoro-adenosine
  modified_base 7: mod_base = OTHER; note = 2'-O-methyl-cytidine
  modified_base 8: mod_base = OTHER; note = 2'-fluoro-uridine
  modified_base 9: mod_base = OTHER; note = 2'-fluoro-uridine
  modified_base 10: mod_base = OTHER; note = 2'-fluoro-uridine
  modified_base 11: mod_base = OTHER; note = 2'-fluoro-guanosine
  modified_base 12: mod_base = OTHER; note = 2'-O-methyl-guanosine
  modified_base 13: mod_base = OTHER; note = 2'-O-methyl-cytidine
  modified_base 14: mod_base = OTHER; note = 2'-O-methyl-uridine
  modified_base 15: mod_base = OTHER; note = 2'-O-methyl-guanosine
  modified_base 16: mod_base = OTHER; note = 2'-O-methyl-guanosine
  modified_base 17: mod_base = OTHER; note = 2'-O-methyl-uridine
  modified_base 18: mod_base = OTHER; note = 2'-O-methyl-adenosine with phosphorothioate linkage
  modified_base 19: mod_base = OTHER; note = 2'-O-methyl-uridine with phosphorothioate linkage
  modified_base 20: mod_base = OTHER; note = 2'-O-methyl-adenosine conjugated to 3 iterations of (2R,3R,4R,5S)-5-(3-(5-(((2R,3R,4R,5R,6R)- 3-acetamido-4,5-dihydroxy-6-(hydroxymethyl)tetrahydro-2H-py ran-2-yl)oxy)pentanamido)propyl)-2-((hydroxyl)methyl)-4-met hoxytetrahydrofuran-3-oxyl
actcaactttggctggtata

SEQ ID NO: 835 - RNA, 20 nt, synthetic construct
  source 1..20: mol_type = other RNA
  modified_base 1: mod_base = OTHER; note = 2'-O-methyl-cytidine with phosphorothioate linkage
  modified_base 2: mod_base = OTHER; note = 2'-O-methyl-uridine with phosphorothioate linkage
  modified_base 3: mod_base = OTHER; note = 2'-O-methyl-cytidine
  modified_base 4: mod_base = OTHER; note = 2'-O-methyl-adenosine
  modified_base 5: mod_base = OTHER; note = 2'-O-methyl-adenosine
  modified_base 6: mod_base = OTHER; note = 2'-fluoro-cytidine
  modified_base 7: mod_base = OTHER; note = 2'-O-methyl-uridine
  modified_base 8: mod_base = OTHER; note = 2'-fluoro-uridine
  modified_base 9: mod_base = OTHER; note = 2'-fluoro-uridine
  modified_base 10: mod_base = OTHER; note = 2'-fluoro-guanosine
  modified_base 11: mod_base = OTHER; note = 2'-fluoro-guanosine
  modified_base 12: mod_base = OTHER; note = 2'-O-methyl-cytidine
  modified_base 13: mod_base = OTHER; note = 2'-O-methyl-uridine
  modified_base 14: mod_base = OTHER; note = 2'-O-methyl-guanosine
  modified_base 15: mod_base = OTHER; note = 2'-O-methyl-guanosine
  modified_base 16: mod_base = OTHER; note = 2'-O-methyl-uridine
  modified_base 17: mod_base = OTHER; note = 2'-O-methyl-adenosine
  modified_base 18: mod_base = OTHER; note = 2'-O-methyl-uridine with phosphorothioate linkage
  modified_base 19: mod_base = OTHER; note = 2'-O-methyl-cytidine with phosphorothioate linkage
  modified_base 20: mod_base = OTHER; note = 2'-O-methyl-adenosine conjugated to 3 iterations of (2R,3R,4R,5S)-5-(3-(5-(((2R,3R,4R,5R,6R)- 3-acetamido-4,5-dihydroxy-6-(hydroxymethyl)tetrahydro-2H-py ran-2-yl)oxy)pentanamido)propyl)-2-((hydroxyl)methyl)-4-met hoxytetrahydrofuran-3-oxyl
ctcaactttggctggtatca

SEQ ID NO: 836 - RNA, 20 nt, synthetic construct
  source 1..20: mol_type = other RNA
  modified_base 1: mod_base = OTHER; note = 2'-O-methyl-uridine with phosphorothioate linkage
  modified_base 2: mod_base = OTHER; note = 2'-O-methyl-cytidine with phosphorothioate linkage
  modified_base 3: mod_base = OTHER; note = 2'-O-methyl-adenosine
  modified_base 4: mod_base = OTHER; note = 2'-O-methyl-adenosine
  modified_base 5: mod_base = OTHER; note = 2'-O-methyl-cytidine
  modified_base 6: mod_base = OTHER; note = 2'-fluoro-uridine
  modified_base 7: mod_base = OTHER; note = 2'-O-methyl-uridine
  modified_base 8: mod_base = OTHER; note = 2'-fluoro-uridine
  modified_base 9: mod_base = OTHER; note = 2'-fluoro-guanosine
  modified_base 10: mod_base = OTHER; note = 2'-fluoro-guanosine
  modified_base 11: mod_base = OTHER; note = 2'-fluoro-cytidine
  modified_base 12: mod_base = OTHER; note = 2'-O-methyl-uridine
  modified_base 13: mod_base = OTHER; note = 2'-O-methyl-guanosine
  modified_base 14: mod_base = OTHER; note = 2'-O-methyl-guanosine
  modified_base 15: mod_base = OTHER; note = 2'-O-methyl-uridine
  modified_base 16: mod_base = OTHER; note = 2'-O-methyl-adenosine
  modified_base 17: mod_base = OTHER; note = 2'-O-methyl-uridine
  modified_base 18: mod_base = OTHER; note = 2'-O-methyl-cytidine with phosphorothioate linkage
  modified_base 19: mod_base = OTHER; note = 2'-O-methyl-uridine with phosphorothioate linkage
  modified_base 20: mod_base = OTHER; note = 2'-O-methyl-adenosine conjugated to 3 iterations of (2R,3R,4R,5S)-5-(3-(5-(((2R,3R,4R,5R,6R)- 3-acetamido-4,5-dihydroxy-6-(hydroxymethyl)tetrahydro-2H-py ran-2-yl)oxy)pentanamido)propyl)-2-((hydroxyl)methyl)-4-met hoxytetrahydrofuran-3-oxyl
tcaactttggctggtatcta

SEQ ID NO: 837 - RNA, 20 nt, synthetic construct
  source 1..20: mol_type = other RNA
  modified_base 1: mod_base = OTHER; note = 2'-O-methyl-adenosine with phosphorothioate linkage
  modified_base 2: mod_base = OTHER; note = 2'-O-methyl-adenosine with phosphorothioate linkage
  modified_base 3: mod_base = OTHER; note = 2'-O-methyl-cytidine
  modified_base 4: mod_base = OTHER; note = 2'-O-methyl-uridine
  modified_base 5: mod_base = OTHER; note = 2'-O-methyl-uridine
  modified_base 6: mod_base = OTHER; note = 2'-fluoro-uridine
  modified_base 7: mod_base = OTHER; note = 2'-O-methyl-guanosine
  modified_base 8: mod_base = OTHER; note = 2'-fluoro-guanosine
  modified_base 9: mod_base = OTHER; note = 2'-fluoro-cytidine
  modified_base 10: mod_base = OTHER; note = 2'-fluoro-uridine
  modified_base 11: mod_base = OTHER; note = 2'-fluoro-guanosine
  modified_base 12: mod_base = OTHER; note = 2'-O-methyl-guanosine
  modified_base 13: mod_base = OTHER; note = 2'-O-methyl-uridine
  modified_base 14: mod_base = OTHER; note = 2'-O-methyl-adenosine
  modified_base 15: mod_base = OTHER; note = 2'-O-methyl-uridine
  modified_base 16: mod_base = OTHER; note = 2'-O-methyl-cytidine
  modified_base 17: mod_base = OTHER; note = 2'-O-methyl-uridine
  modified_base 18: mod_base = OTHER; note = 2'-O-methyl-guanosine with phosphorothioate linkage
  modified_base 19: mod_base = OTHER; note = 2'-O-methyl-adenosine with phosphorothioate linkage
  modified_base 20: mod_base = OTHER; note = 2'-O-methyl-adenosine conjugated to 3 iterations of (2R,3R,4R,5S)-5-(3-(5-(((2R,3R,4R,5R,6R)- 3-acetamido-4,5-dihydroxy-6-(hydroxymethyl)tetrahydro-2H-py ran-2-yl)oxy)pentanamido)propyl)-2-((hydroxyl)methyl)-4-met hoxytetrahydrofuran-3-oxyl
aactttggctggtatctgaa

SEQ ID NO: 838 - RNA, 20 nt, synthetic construct
  source 1..20: mol_type = other RNA
  modified_base 1: mod_base = OTHER; note = 2'-O-methyl-adenosine with phosphorothioate linkage
  modified_base 2: mod_base = OTHER; note = 2'-O-methyl-cytidine with phosphorothioate linkage
  modified_base 3: mod_base = OTHER; note = 2'-O-methyl-uridine
  modified_base 4: mod_base = OTHER; note = 2'-O-methyl-uridine
  modified_base 5: mod_base = OTHER; note = 2'-O-methyl-uridine
  modified_base 6: mod_base = OTHER; note = 2'-fluoro-guanosine
  modified_base 7: mod_base = OTHER; note = 2'-O-methyl-guanosine
  modified_base 8: mod_base = OTHER; note = 2'-fluoro-cytidine
  modified_base 9: mod_base = OTHER; note = 2'-fluoro-uridine
  modified_base 10: mod_base = OTHER; note = 2'-fluoro-guanosine
  modified_base 11: mod_base = OTHER; note = 2'-fluoro-guanosine
  modified_base 12: mod_base = OTHER; note = 2'-O-methyl-uridine
  modified_base 13: mod_base = OTHER; note = 2'-O-methyl-adenosine
  modified_base 14: mod_base = OTHER; note = 2'-O-methyl-uridine
  modified_base 15: mod_base = OTHER; note = 2'-O-methyl-cytidine
  modified_base 16: mod_base = OTHER; note = 2'-O-methyl-uridine
  modified_base 17: mod_base = OTHER; note = 2'-O-methyl-guanosine
  modified_base 18: mod_base = OTHER; note = 2'-O-methyl-adenosine with phosphorothioate linkage
  modified_base 19: mod_base = OTHER; note = 2'-O-methyl-adenosine with phosphorothioate linkage
  modified_base 20: mod_base = OTHER; note = 2'-O-methyl-adenosine conjugated to 3 iterations of (2R,3R,4R,5S)-5-(3-(5-(((2R,3R,4R,5R,6R)- 3-acetamido-4,5-dihydroxy-6-(hydroxymethyl)tetrahydro-2H-py ran-2-yl)oxy)pentanamido)propyl)-2-((hydroxyl)methyl)-4-met hoxytetrahydrofuran-3-oxyl
actttggctggtatctgaaa

SEQ ID NO: 839 - RNA, 20 nt, synthetic construct
  source 1..20: mol_type = other RNA
  modified_base 1: mod_base = OTHER; note = 2'-O-methyl-cytidine with phosphorothioate linkage
  modified_base 2: mod_base = OTHER; note = 2'-O-methyl-uridine with phosphorothioate linkage
  modified_base 3: mod_base = OTHER; note = 2'-O-methyl-uridine
  modified_base 4: mod_base = OTHER; note = 2'-O-methyl-uridine
  modified_base 5: mod_base = OTHER; note = 2'-O-methyl-guanosine
  modified_base 6: mod_base = OTHER; note = 2'-fluoro-guanosine
  modified_base 7: mod_base = OTHER; note = 2'-O-methyl-cytidine
  modified_base 8: mod_base = OTHER; note = 2'-fluoro-uridine
  modified_base 9: mod_base = OTHER; note = 2'-fluoro-guanosine
  modified_base 10: mod_base = OTHER; note = 2'-fluoro-guanosine
  modified_base 11: mod_base = OTHER; note = 2'-fluoro-uridine
  modified_base 12: mod_base = OTHER; note = 2'-O-methyl-adenosine
  modified_base 13: mod_base = OTHER; note = 2'-O-methyl-uridine
  modified_base 14: mod_base = OTHER; note = 2'-O-methyl-cytidine
  modified_base 15: mod_base = OTHER; note = 2'-O-methyl-uridine
  modified_base 16: mod_base = OTHER; note = 2'-O-methyl-guanosine
  modified_base 17: mod_base = OTHER; note = 2'-O-methyl-adenosine
  modified_base 18: mod_base = OTHER; note = 2'-O-methyl-adenosine with phosphorothioate linkage
  modified_base 19: mod_base = OTHER; note = 2'-O-methyl-uridine with phosphorothioate linkage
  modified_base 20: mod_base = OTHER; note = 2'-O-methyl-adenosine conjugated to 3 iterations of (2R,3R,4R,5S)-5-(3-(5-(((2R,3R,4R,5R,6R)- 3-acetamido-4,5-dihydroxy-6-(hydroxymethyl)tetrahydro-2H-py ran-2-yl)oxy)pentanamido)propyl)-2-((hydroxyl)methyl)-4-met hoxytetrahydrofuran-3-oxyl
ctttggctggtatctgaata

SEQ ID NO: 840 - RNA, 20 nt, synthetic construct
  source 1..20: mol_type = other RNA
  modified_base 1: mod_base = OTHER; note = 2'-O-methyl-uridine with phosphorothioate linkage
  modified_base 2: mod_base = OTHER; note = 2'-O-methyl-uridine with phosphorothioate linkage
  modified_base 3: mod_base = OTHER; note = 2'-O-methyl-uridine
  modified_base 4: mod_base = OTHER; note = 2'-O-methyl-guanosine
  modified_base 5: mod_base = OTHER; note = 2'-O-methyl-guanosine
  modified_base 6: mod_base = OTHER; note = 2'-fluoro-cytidine
  modified_base 7: mod_base = OTHER; note = 2'-O-methyl-uridine
  modified_base 8: mod_base = OTHER; note = 2'-fluoro-guanosine
  modified_base 9: mod_base = OTHER; note = 2'-fluoro-guanosine
  modified_base 10: mod_base = OTHER; note = 2'-fluoro-uridine
  modified_base 11: mod_base = OTHER; note = 2'-fluoro-adenosine
  modified_base 12: mod_base = OTHER; note = 2'-O-methyl-uridine
  modified_base 13: mod_base = OTHER; note = 2'-O-methyl-cytidine
  modified_base 14: mod_base = OTHER; note = 2'-O-methyl-uridine
  modified_base 15: mod_base = OTHER; note = 2'-O-methyl-guanosine
  modified_base 16: mod_base = OTHER; note = 2'-O-methyl-adenosine
  modified_base 17: mod_base = OTHER; note = 2'-O-methyl-adenosine
  modified_base 18: mod_base = OTHER; note = 2'-O-methyl-uridine with phosphorothioate linkage
  modified_base 19: mod_base = OTHER; note = 2'-O-methyl-adenosine with phosphorothioate linkage
  modified_base 20: mod_base = OTHER; note = 2'-O-methyl-adenosine conjugated to 3 iterations of (2R,3R,4R,5S)-5-(3-(5-(((2R,3R,4R,5R,6R)- 3-acetamido-4,5-dihydroxy-6-(hydroxymethyl)tetrahydro-2H-py ran-2-yl)oxy)pentanamido)propyl)-2-((hydroxyl)methyl)-4-met hoxytetrahydrofuran-3-oxyl
tttggctggtatctgaataa

SEQ ID NO: 841 - RNA, 20 nt, synthetic construct
  source 1..20: mol_type = other RNA
  modified_base 1: mod_base = OTHER; note = 2'-O-methyl-adenosine with phosphorothioate linkage
  modified_base 2: mod_base = OTHER; note = 2'-O-methyl-uridine with phosphorothioate linkage
  modified_base 3: mod_base = OTHER; note = 2'-O-methyl-adenosine
  modified_base 4: mod_base = OTHER; note = 2'-O-methyl-uridine
  modified_base 5: mod_base = OTHER; note = 2'-O-methyl-cytidine
  modified_base 6: mod_base = OTHER; note = 2'-fluoro-adenosine
  modified_base 7: mod_base = OTHER; note = 2'-O-methyl-uridine
  modified_base 8: mod_base = OTHER; note = 2'-fluoro-guanosine
  modified_base 9: mod_base = OTHER; note = 2'-fluoro-adenosine
  modified_base 10: mod_base = OTHER; note = 2'-fluoro-adenosine
  modified_base 11: mod_base = OTHER; note = 2'-fluoro-cytidine
  modified_base 12: mod_base = OTHER; note = 2'-O-methyl-adenosine
  modified_base 13: mod_base = OTHER; note = 2'-O-methyl-guanosine
  modified_base 14: mod_base = OTHER; note = 2'-O-methyl-guanosine
  modified_base 15: mod_base = OTHER; note = 2'-O-methyl-guanosine
  modified_base 16: mod_base = OTHER; note = 2'-O-methyl-cytidine
  modified_base 17: mod_base = OTHER; note = 2'-O-methyl-uridine
  modified_base 18: mod_base = OTHER; note = 2'-O-methyl-cytidine with phosphorothioate linkage
  modified_base 19: mod_base = OTHER; note = 2'-O-methyl-cytidine with phosphorothioate linkage
  modified_base 20: mod_base = OTHER; note = 2'-O-methyl-adenosine conjugated to 3 iterations of (2R,3R,4R,5S)-5-(3-(5-(((2R,3R,4R,5R,6R)- 3-acetamido-4,5-dihydroxy-6-(hydroxymethyl)tetrahydro-2H-py ran-2-yl)oxy)pentanamido)propyl)-2-((hydroxyl)methyl)-4-met hoxytetrahydrofuran-3-oxyl
atatcatgaacagggctcca

SEQ ID NO: 842 - RNA, 20 nt, synthetic construct
  source 1..20: mol_type = other RNA
  modified_base 1: mod_base = OTHER; note = 2'-O-methyl-uridine with phosphorothioate linkage
  modified_base 2: mod_base = OTHER; note = 2'-O-methyl-adenosine with phosphorothioate linkage
  modified_base 3: mod_base = OTHER; note = 2'-O-methyl-uridine
  modified_base 4: mod_base = OTHER; note = 2'-O-methyl-cytidine
  modified_base 5: mod_base = OTHER; note = 2'-O-methyl-adenosine
  modified_base 6: mod_base = OTHER; note = 2'-fluoro-uridine
  modified_base 7: mod_base = OTHER; note = 2'-O-methyl-guanosine
  modified_base 8: mod_base = OTHER; note = 2'-fluoro-adenosine
  modified_base 9: mod_base = OTHER; note = 2'-fluoro-adenosine
  modified_base 10: mod_base = OTHER; note = 2'-fluoro-cytidine
  modified_base 11: mod_base = OTHER; note = 2'-fluoro-adenosine
  modified_base 12: mod_base = OTHER; note = 2'-O-methyl-guanosine
  modified_base 13: mod_base = OTHER; note = 2'-O-methyl-guanosine
  modified_base 14: mod_base = OTHER; note = 2'-O-methyl-guanosine
  modified_base 15: mod_base = OTHER; note = 2'-O-methyl-cytidine
  modified_base 16: mod_base = OTHER; note = 2'-O-methyl-uridine
  modified_base 17: mod_base = OTHER; note = 2'-O-methyl-cytidine
  modified_base 18: mod_base = OTHER; note = 2'-O-methyl-cytidine with phosphorothioate linkage
  modified_base 19: mod_base = OTHER; note = 2'-O-methyl-uridine with phosphorothioate linkage
  modified_base 20: mod_base = OTHER; note = 2'-O-methyl-adenosine conjugated to 3 iterations of (2R,3R,4R,5S)-5-(3-(5-(((2R,3R,4R,5R,6R)- 3-acetamido-4,5-dihydroxy-6-(hydroxymethyl)tetrahydro-2H-py ran-2-yl)oxy)pentanamido)propyl)-2-((hydroxyl)methyl)-4-met hoxytetrahydrofuran-3-oxyl
tatcatgaacagggctccta

SEQ ID NO: 843 - RNA, 20 nt, synthetic construct
  source 1..20: mol_type = other RNA
  modified_base 1: mod_base = OTHER; note = 2'-O-methyl-adenosine with phosphorothioate linkage
  modified_base 2: mod_base = OTHER; note = 2'-O-methyl-uridine with phosphorothioate linkage
  modified_base 3: mod_base = OTHER; note = 2'-O-methyl-cytidine
  modified_base 4: mod_base = OTHER; note = 2'-O-methyl-adenosine
  modified_base 5: mod_base = OTHER; note = 2'-O-methyl-uridine
  modified_base 6: mod_base = OTHER; note = 2'-fluoro-guanosine
  modified_base 7: mod_base = OTHER; note = 2'-O-methyl-adenosine
  modified_base 8: mod_base = OTHER; note = 2'-fluoro-adenosine
  modified_base 9: mod_base = OTHER; note = 2'-fluoro-cytidine
  modified_base 10: mod_base = OTHER; note = 2'-fluoro-adenosine
  modified_base 11: mod_base = OTHER; note = 2'-fluoro-guanosine
  modified_base 12: mod_base = OTHER; note = 2'-O-methyl-guanosine
  modified_base 13: mod_base = OTHER; note = 2'-O-methyl-guanosine
  modified_base 14: mod_base = OTHER; note = 2'-O-methyl-cytidine
  modified_base 15: mod_base = OTHER; note = 2'-O-methyl-uridine
  modified_base 16: mod_base = OTHER; note = 2'-O-methyl-cytidine
  modified_base 17: mod_base = OTHER; note = 2'-O-methyl-cytidine
  modified_base 18: mod_base = OTHER; note = 2'-O-methyl-uridine with phosphorothioate linkage
  modified_base 19: mod_base = OTHER; note = 2'-O-methyl-uridine with phosphorothioate linkage
  modified_base 20: mod_base = OTHER; note = 2'-O-methyl-adenosine conjugated to 3 iterations of (2R,3R,4R,5S)-5-(3-(5-(((2R,3R,4R,5R,6R)- 3-acetamido-4,5-dihydroxy-6-(hydroxymethyl)tetrahydro-2H-py ran-2-yl)oxy)pentanamido)propyl)-2-((hydroxyl)methyl)-4-met hoxytetrahydrofuran-3-oxyl
atcatgaacagggctcctta

SEQ ID NO: 844 - RNA, 20 nt, synthetic construct
  source 1..20: mol_type = other RNA
  modified_base 1: mod_base = OTHER; note = 2'-O-methyl-uridine with phosphorothioate linkage
  modified_base 2: mod_base = OTHER; note = 2'-O-methyl-cytidine with phosphorothioate linkage
  modified_base 3: mod_base = OTHER; note = 2'-O-methyl-adenosine
  modified_base 4: mod_base = OTHER; note = 2'-O-methyl-uridine
  modified_base 5: mod_base = OTHER; note = 2'-O-methyl-guanosine
  modified_base 6: mod_base = OTHER; note = 2'-fluoro-adenosine
  modified_base 7: mod_base = OTHER; note = 2'-O-methyl-adenosine
  modified_base 8: mod_base = OTHER; note = 2'-fluoro-cytidine
  modified_base 9: mod_base = OTHER; note = 2'-fluoro-adenosine
  modified_base 10: mod_base = OTHER; note = 2'-fluoro-guanosine
  modified_base 11: mod_base = OTHER; note = 2'-fluoro-guanosine
  modified_base 12: mod_base = OTHER; note = 2'-O-methyl-guanosine
  modified_base 13: mod_base = OTHER; note = 2'-O-methyl-cytidine
  modified_base 14: mod_base = OTHER; note = 2'-O-methyl-uridine
  modified_base 15: mod_base = OTHER; note = 2'-O-methyl-cytidine
  modified_base 16: mod_base = OTHER; note = 2'-O-methyl-cytidine
  modified_base 17: mod_base = OTHER; note = 2'-O-methyl-uridine
  modified_base 18: mod_base = OTHER; note = 2'-O-methyl-uridine with phosphorothioate linkage
  modified_base 19: mod_base = OTHER; note = 2'-O-methyl-adenosine with phosphorothioate linkage
  modified_base 20: mod_base = OTHER; note = 2'-O-methyl-adenosine conjugated to 3 iterations of (2R,3R,4R,5S)-5-(3-(5-(((2R,3R,4R,5R,6R)- 3-acetamido-4,5-dihydroxy-6-(hydroxymethyl)tetrahydro-2H-py ran-2-yl)oxy)pentanamido)propyl)-2-((hydroxyl)methyl)-4-met hoxytetrahydrofuran-3-oxyl
tcatgaacagggctccttaa

SEQ ID NO: 845 - RNA, 20 nt, synthetic construct
  source 1..20: mol_type = other RNA
  modified_base 1: mod_base = OTHER; note = 2'-O-methyl-cytidine with phosphorothioate linkage
  modified_base 2: mod_base = OTHER; note = 2'-O-methyl-adenosine with phosphorothioate linkage
  modified_base 3: mod_base = OTHER; note = 2'-O-methyl-uridine
  modified_base 4: mod_base = OTHER; note = 2'-O-methyl-guanosine
  modified_base 5: mod_base = OTHER; note = 2'-O-methyl-adenosine
  modified_base 6: mod_base = OTHER; note = 2'-fluoro-adenosine
  modified_base 7: mod_base = OTHER; note = 2'-O-methyl-cytidine
  modified_base 8: mod_base = OTHER; note = 2'-fluoro-adenosine
  modified_base 9: mod_base = OTHER; note = 2'-fluoro-guanosine
  modified_base 10: mod_base = OTHER; note = 2'-fluoro-guanosine
  modified_base 11: mod_base = OTHER; note = 2'-fluoro-guanosine
  modified_base 12: mod_base = OTHER; note = 2'-O-methyl-cytidine
  modified_base 13: mod_base = OTHER; note = 2'-O-methyl-uridine
  modified_base 14: mod_base = OTHER; note = 2'-O-methyl-cytidine
  modified_base 15: mod_base = OTHER; note = 2'-O-methyl-cytidine
  modified_base 16: mod_base = OTHER; note = 2'-O-methyl-uridine
  modified_base 17: mod_base = OTHER; note = 2'-O-methyl-uridine
  modified_base 18: mod_base = OTHER; note = 2'-O-methyl-adenosine with phosphorothioate linkage
  modified_base 19: mod_base = OTHER; note = 2'-O-methyl-uridine with phosphorothioate linkage
  modified_base 20: mod_base = OTHER; note = 2'-O-methyl-adenosine conjugated to 3 iterations of (2R,3R,4R,5S)-5-(3-(5-(((2R,3R,4R,5R,6R)- 3-acetamido-4,5-dihydroxy-6-(hydroxymethyl)tetrahydro-2H-py ran-2-yl)oxy)pentanamido)propyl)-2-((hydroxyl)methyl)-4-met hoxytetrahydrofuran-3-oxyl
catgaacagggctccttata

SEQ ID NO: 846 - RNA, 20 nt, synthetic construct
  source 1..20: mol_type = other RNA
  modified_base 1: mod_base = OTHER; note = 2'-O-methyl-adenosine with phosphorothioate linkage
  modified_base 2: mod_base = OTHER; note = 2'-O-methyl-uridine with phosphorothioate linkage
  modified_base 3: mod_base = OTHER; note = 2'-O-methyl-guanosine
  modified_base 4: mod_base = OTHER; note = 2'-O-methyl-adenosine
  modified_base 5: mod_base = OTHER; note = 2'-O-methyl-adenosine
  modified_base 6: mod_base = OTHER; note = 2'-fluoro-cytidine
  modified_base 7: mod_base = OTHER; note = 2'-O-methyl-adenosine
  modified_base 8: mod_base = OTHER; note = 2'-fluoro-guanosine
  modified_base 9: mod_base = OTHER; note = 2'-fluoro-guanosine
  modified_base 10: mod_base = OTHER; note = 2'-fluoro-guanosine
  modified_base 11: mod_base = OTHER; note = 2'-fluoro-cytidine
  modified_base 12: mod_base = OTHER; note = 2'-O-methyl-uridine
  modified_base 13: mod_base = OTHER; note = 2'-O-methyl-cytidine
  modified_base 14: mod_base = OTHER; note = 2'-O-methyl-cytidine
  modified_base 15: mod_base = OTHER; note = 2'-O-methyl-uridine
  modified_base 16: mod_base = OTHER; note = 2'-O-methyl-uridine
  modified_base 17: mod_base = OTHER; note = 2'-O-methyl-adenosine
  modified_base 18: mod_base = OTHER; note = 2'-O-methyl-uridine with phosphorothioate linkage
  modified_base 19: mod_base = OTHER; note = 2'-O-methyl-adenosine with phosphorothioate linkage
  modified_base 20: mod_base = OTHER; note = 2'-O-methyl-adenosine conjugated to 3 iterations of (2R,3R,4R,5S)-5-(3-(5-(((2R,3R,4R,5R,6R)- 3-acetamido-4,5-dihydroxy-6-(hydroxymethyl)tetrahydro-2H-py ran-2-yl)oxy)pentanamido)propyl)-2-((hydroxyl)methyl)-4-met hoxytetrahydrofuran-3-oxyl
atgaacagggctccttataa

SEQ ID NO: 847 - RNA, 20 nt, synthetic construct
  source 1..20: mol_type = other RNA
  modified_base 1: mod_base = OTHER; note = 2'-O-methyl-uridine with phosphorothioate linkage
  modified_base 2: mod_base = OTHER; note = 2'-O-methyl-guanosine with phosphorothioate linkage
  modified_base 3: mod_base = OTHER; note = 2'-O-methyl-adenosine
  modified_base 4: mod_base = OTHER; note = 2'-O-methyl-adenosine
  modified_base 5: mod_base = OTHER; note = 2'-O-methyl-cytidine
  modified_base 6: mod_base = OTHER; note = 2'-fluoro-adenosine
  modified_base 7: mod_base = OTHER; note = 2'-O-methyl-guanosine
  modified_base 8: mod_base = OTHER; note = 2'-fluoro-guanosine
  modified_base 9: mod_base = OTHER; note = 2'-fluoro-guanosine
  modified_base 10: mod_base = OTHER; note = 2'-fluoro-cytidine
  modified_base 11: mod_base = OTHER; note = 2'-fluoro-uridine
  modified_base 12: mod_base = OTHER; note = 2'-O-methyl-cytidine
  modified_base 13: mod_base = OTHER; note = 2'-O-methyl-cytidine
  modified_base 14: mod_base = OTHER; note = 2'-O-methyl-uridine
  modified_base 15: mod_base = OTHER; note = 2'-O-methyl-uridine
  modified_base 16: mod_base = OTHER; note = 2'-O-methyl-adenosine
  modified_base 17: mod_base = OTHER; note = 2'-O-methyl-uridine
  modified_base 18: mod_base = OTHER; note = 2'-O-methyl-adenosine with phosphorothioate linkage
  modified_base 19: mod_base = OTHER; note = 2'-O-methyl-uridine with phosphorothioate linkage
  modified_base 20: mod_base = OTHER; note = 2'-O-methyl-adenosine conjugated to 3 iterations of (2R,3R,4R,5S)-5-(3-(5-(((2R,3R,4R,5R,6R)- 3-acetamido-4,5-dihydroxy-6-(hydroxymethyl)tetrahydro-2H-py ran-2-yl)oxy)pentanamido)propyl)-2-((hydroxyl)methyl)-4-met hoxytetrahydrofuran-3-oxyl
tgaacagggctccttatata

SEQ ID NO: 848 - RNA, 20 nt, synthetic construct
  source 1..20: mol_type = other RNA
  modified_base 1: mod_base = OTHER; note = 2'-O-methyl-guanosine with phosphorothioate linkage
  modified_base 2: mod_base = OTHER; note = 2'-O-methyl-adenosine with phosphorothioate linkage
  modified_base 3: mod_base = OTHER; note = 2'-O-methyl-adenosine
  modified_base 4: mod_base = OTHER; note = 2'-O-methyl-cytidine
  modified_base 5: mod_base = OTHER; note = 2'-O-methyl-adenosine
  modified_base 6: mod_base = OTHER; note = 2'-fluoro-guanosine
  modified_base 7: mod_base = OTHER; note = 2'-O-methyl-guanosine
  modified_base 8: mod_base = OTHER; note = 2'-fluoro-guanosine
  modified_base 9: mod_base = OTHER; note = 2'-fluoro-cytidine
  modified_base 10: mod_base = OTHER; note = 2'-fluoro-uridine
  modified_base 11: mod_base = OTHER; note = 2'-fluoro-cytidine
  modified_base 12: mod_base = OTHER; note = 2'-O-methyl-cytidine
  modified_base 13: mod_base = OTHER; note = 2'-O-methyl-uridine
  modified_base 14: mod_base = OTHER; note = 2'-O-methyl-uridine
  modified_base 15: mod_base = OTHER; note = 2'-O-methyl-adenosine
  modified_base 16: mod_base = OTHER; note = 2'-O-methyl-uridine
  modified_base 17: mod_base = OTHER; note = 2'-O-methyl-adenosine
  modified_base 18: mod_base = OTHER; note = 2'-O-methyl-uridine with phosphorothioate linkage
  modified_base 19: mod_base = OTHER; note = 2'-O-methyl-guanosine with phosphorothioate linkage
  modified_base 20: mod_base = OTHER; note = 2'-O-methyl-adenosine conjugated to 3 iterations of (2R,3R,4R,5S)-5-(3-(5-(((2R,3R,4R,5R,6R)- 3-acetamido-4,5-dihydroxy-6-(hydroxymethyl)tetrahydro-2H-py ran-2-yl)oxy)pentanamido)propyl)-2-((hydroxyl)methyl)-4-met hoxytetrahydrofuran-3-oxyl
gaacagggctccttatatga

SEQ ID NO: 849 - RNA, 20 nt, synthetic construct
  source 1..20: mol_type = other RNA
  modified_base 1: mod_base = OTHER; note = 2'-O-methyl-adenosine with phosphorothioate linkage
  modified_base 2: mod_base = OTHER; note = 2'-O-methyl-cytidine with phosphorothioate linkage
  modified_base 3: mod_base = OTHER; note = 2'-O-methyl-adenosine
  modified_base 4: mod_base = OTHER; note = 2'-O-methyl-guanosine
  modified_base 5: mod_base = OTHER; note = 2'-O-methyl-guanosine
  modified_base 6: mod_base = OTHER; note = 2'-fluoro-guanosine
  modified_base 7: mod_base = OTHER; note = 2'-O-methyl-cytidine
  modified_base 8: mod_base = OTHER; note = 2'-fluoro-uridine
  modified_base 9: mod_base = OTHER; note = 2'-fluoro-cytidine
  modified_base 10: mod_base = OTHER; note = 2'-fluoro-cytidine
  modified_base 11: mod_base = OTHER; note = 2'-fluoro-uridine
  modified_base 12: mod_base = OTHER; note = 2'-O-methyl-uridine
  modified_base 13: mod_base = OTHER; note = 2'-O-methyl-adenosine
  modified_base 14: mod_base = OTHER; note = 2'-O-methyl-uridine
  modified_base 15: mod_base = OTHER; note = 2'-O-methyl-adenosine
  modified_base 16: mod_base = OTHER; note = 2'-O-methyl-uridine
  modified_base 17: mod_base = OTHER; note = 2'-O-methyl-guanosine
  modified_base 18: mod_base = OTHER; note = 2'-O-methyl-adenosine with phosphorothioate linkage
  modified_base 19: mod_base = OTHER; note = 2'-O-methyl-cytidine with phosphorothioate linkage
  modified_base 20: mod_base = OTHER; note = 2'-O-methyl-adenosine conjugated to 3 iterations of (2R,3R,4R,5S)-5-(3-(5-(((2R,3R,4R,5R,6R)- 3-acetamido-4,5-dihydroxy-6-(hydroxymethyl)tetrahydro-2H-py ran-2-yl)oxy)pentanamido)propyl)-2-((hydroxyl)methyl)-4-met hoxytetrahydrofuran-3-oxyl
acagggctccttatatgaca

SEQ ID NO: 850 - RNA, 20 nt, synthetic construct
  source 1..20: mol_type = other RNA
  modified_base 1: mod_base = OTHER; note = 2'-O-methyl-adenosine with phosphorothioate linkage
  modified_base 2: mod_base = OTHER; note = 2'-O-methyl-guanosine with phosphorothioate linkage
  modified_base 3: mod_base = OTHER; note = 2'-O-methyl-guanosine
  modified_base 4: mod_base = OTHER; note = 2'-O-methyl-guanosine
  modified_base 5: mod_base = OTHER; note = 2'-O-methyl-cytidine
  modified_base 6: mod_base = OTHER; note = 2'-fluoro-uridine
  modified_base 7: mod_base = OTHER; note = 2'-O-methyl-cytidine
  modified_base 8: mod_base = OTHER; note = 2'-fluoro-cytidine
  modified_base 9: mod_base = OTHER; note = 2'-fluoro-uridine
  modified_base 10: mod_base = OTHER; note = 2'-fluoro-uridine
  modified_base 11: mod_base = OTHER; note = 2'-fluoro-adenosine
  modified_base 12: mod_base = OTHER; note = 2'-O-methyl-uridine
  modified_base 13: mod_base = OTHER; note = 2'-O-methyl-adenosine
  modified_base 14: mod_base = OTHER; note = 2'-O-methyl-uridine
  modified_base 15: mod_base = OTHER; note = 2'-O-methyl-guanosine
  modified_base 16: mod_base = OTHER; note = 2'-O-methyl-adenosine
  modified_base 17: mod_base = OTHER; note = 2'-O-methyl-cytidine
  modified_base 18: mod_base = OTHER; note = 2'-O-methyl-uridine with phosphorothioate linkage
  modified_base 19: mod_base = OTHER; note = 2'-O-methyl-adenosine with phosphorothioate linkage
  modified_base 20: mod_base = OTHER; note = 2'-O-methyl-adenosine conjugated to 3 iterations of (2R,3R,4R,5S)-5-(3-(5-(((2R,3R,4R,5R,6R)- 3-acetamido-4,5-dihydroxy-6-(hydroxymethyl)tetrahydro-2H-py ran-2-yl)oxy)pentanamido)propyl)-2-((hydroxyl)methyl)-4-met hoxytetrahydrofuran-3-oxyl
agggctccttatatgactaa

SEQ ID NO: 851 - RNA, 20 nt, synthetic construct
  source 1..20: mol_type = other RNA
  modified_base 1: mod_base = OTHER; note = 2'-O-methyl-guanosine with phosphorothioate linkage
  modified_base 2: mod_base = OTHER; note = 2'-O-methyl-guanosine with phosphorothioate linkage
  modified_base 3: mod_base = OTHER; note = 2'-O-methyl-cytidine
  modified_base 4: mod_base = OTHER; note = 2'-O-methyl-uridine
  modified_base 5: mod_base = OTHER; note = 2'-O-methyl-cytidine
  modified_base 6: mod_base = OTHER; note = 2'-fluoro-cytidine
  modified_base 7: mod_base = OTHER; note = 2'-O-methyl-uridine
  modified_base 8: mod_base = OTHER; note = 2'-fluoro-uridine
  modified_base 9: mod_base = OTHER; note = 2'-fluoro-adenosine
  modified_base 10: mod_base = OTHER; note = 2'-fluoro-uridine
  modified_base 11: mod_base = OTHER; note = 2'-fluoro-adenosine
  modified_base 12: mod_base = OTHER; note = 2'-O-methyl-uridine
  modified_base 13: mod_base = OTHER; note = 2'-O-methyl-guanosine
  modified_base 14: mod_base = OTHER; note = 2'-O-methyl-adenosine
  modified_base 15: mod_base = OTHER; note = 2'-O-methyl-cytidine
  modified_base 16: mod_base = OTHER; note = 2'-O-methyl-uridine
  modified_base 17: mod_base = OTHER; note = 2'-O-methyl-adenosine
  modified_base 18: mod_base = OTHER; note = 2'-O-methyl-uridine with phosphorothioate linkage
  modified_base 19: mod_base = OTHER; note = 2'-O-methyl-uridine with phosphorothioate linkage
  modified_base 20: mod_base = OTHER; note = 2'-O-methyl-adenosine conjugated to 3 iterations of (2R,3R,4R,5S)-5-(3-(5-(((2R,3R,4R,5R,6R)- 3-acetamido-4,5-dihydroxy-6-(hydroxymethyl)tetrahydro-2H-py ran-2-yl)oxy)pentanamido)propyl)-2-((hydroxyl)methyl)-4-met hoxytetrahydrofuran-3-oxyl
ggctccttatatgactatta

SEQ ID NO: 852 - RNA, 20 nt, synthetic construct
  source 1..20: mol_type = other RNA
  modified_base 1: mod_base = OTHER; note = 2'-O-methyl-cytidine with phosphorothioate linkage
  modified_base 2: mod_base = OTHER; note = 2'-O-methyl-uridine with phosphorothioate linkage
  modified_base 3: mod_base = OTHER; note = 2'-O-methyl-cytidine
  modified_base 4: mod_base = OTHER; note = 2'-O-methyl-cytidine
  modified_base 5: mod_base = OTHER; note = 2'-O-methyl-uridine
  modified_base 6: mod_base = OTHER; note = 2'-fluoro-uridine
  modified_base 7: mod_base = OTHER; note = 2'-O-methyl-adenosine
  modified_base 8: mod_base = OTHER; note = 2'-fluoro-uridine
  modified_base 9: mod_base = OTHER; note = 2'-fluoro-adenosine
  modified_base 10: mod_base = OTHER; note = 2'-fluoro-uridine
  modified_base 11: mod_base = OTHER; note = 2'-fluoro-guanosine
  modified_base 12: mod_base = OTHER; note = 2'-O-methyl-adenosine
  modified_base 13: mod_base = OTHER; note = 2'-O-methyl-cytidine
  modified_base 14: mod_base = OTHER; note = 2'-O-methyl-uridine
  modified_base 15: mod_base = OTHER; note = 2'-O-methyl-adenosine
  modified_base 16: mod_base = OTHER; note = 2'-O-methyl-uridine
  modified_base 17: mod_base = OTHER; note = 2'-O-methyl-uridine
  modified_base 18: mod_base = OTHER; note = 2'-O-methyl-uridine with phosphorothioate linkage
  modified_base 19: mod_base = OTHER; note = 2'-O-methyl-guanosine with phosphorothioate linkage
  modified_base 20: mod_base = OTHER; note = 2'-O-methyl-adenosine conjugated to 3 iterations of (2R,3R,4R,5S)-5-(3-(5-(((2R,3R,4R,5R,6R)- 3-acetamido-4,5-dihydroxy-6-(hydroxymethyl)tetrahydro-2H-py ran-2-yl)oxy)pentanamido)propyl)-2-((hydroxyl)methyl)-4-met hoxytetrahydrofuran-3-oxyl
ctccttatatgactatttga

SEQ ID NO: 853 - RNA, 20 nt, synthetic construct
  source 1..20: mol_type = other RNA
  modified_base 1: mod_base = OTHER; note = 2'-O-methyl-guanosine with phosphorothioate linkage
  modified_base 2: mod_base = OTHER; note = 2'-O-methyl-adenosine with phosphorothioate linkage
  modified_base 3: mod_base = OTHER; note = 2'-O-methyl-cytidine
  modified_base 4: mod_base = OTHER; note = 2'-O-methyl-adenosine
  modified_base 5: mod_base = OTHER; note = 2'-O-methyl-adenosine
  modified_base 6: mod_base = OTHER; note = 2'-fluoro-cytidine
  modified_base 7: mod_base = OTHER; note = 2'-O-methyl-adenosine
  modified_base 8: mod_base = OTHER; note = 2'-fluoro-adenosine
  modified_base 9: mod_base = OTHER; note = 2'-fluoro-adenosine
  modified_base 10: mod_base = OTHER; note = 2'-fluoro-guanosine
  modified_base 11: mod_base = OTHER; note = 2'-fluoro-adenosine
  modified_base 12: mod_base = OTHER; note = 2'-O-methyl-uridine
  modified_base 13: mod_base = OTHER; note = 2'-O-methyl-adenosine
  modified_base 14: mod_base = OTHER; note = 2'-O-methyl-adenosine
  modified_base 15: mod_base = OTHER; note = 2'-O-methyl-uridine
  modified_base 16: mod_base = OTHER; note = 2'-O-methyl-guanosine
  modified_base 17: mod_base = OTHER; note = 2'-O-methyl-guanosine
  modified_base 18: mod_base = OTHER; note = 2'-O-methyl-adenosine with phosphorothioate linkage
  modified_base 19: mod_base = OTHER; note = 2'-O-methyl-adenosine with phosphorothioate linkage
  modified_base 20: mod_base = OTHER; note = 2'-O-methyl-adenosine conjugated to 3 iterations of (2R,3R,4R,5S)-5-(3-(5-(((2R,3R,4R,5R,6R)- 3-acetamido-4,5-dihydroxy-6-(hydroxymethyl)tetrahydro-2H-py ran-2-yl)oxy)pentanamido)propyl)-2-((hydroxyl)methyl)-4-met hoxytetrahydrofuran-3-oxyl
gacaacaaagataatggaaa

SEQ ID NO: 854 - RNA, 20 nt, synthetic construct
  source 1..20: mol_type = other RNA
  modified_base 1: mod_base = OTHER; note = 2'-O-methyl-guanosine with phosphorothioate linkage
  modified_base 2: mod_base = OTHER; note = 2'-O-methyl-guanosine with phosphorothioate linkage
  modified_base 3: mod_base = OTHER; note = 2'-O-methyl-cytidine
  modified_base 4: mod_base = OTHER; note = 2'-O-methyl-adenosine
  modified_base 5: mod_base = OTHER; note = 2'-O-methyl-uridine
  modified_base 6: mod_base = OTHER; note = 2'-fluoro-guanosine
  modified_base 7: mod_base = OTHER; note = 2'-O-methyl-uridine
  modified_base 8: mod_base = OTHER; note = 2'-fluoro-cytidine
  modified_base 9: mod_base = OTHER; note = 2'-fluoro-adenosine
  modified_base 10: mod_base = OTHER; note = 2'-fluoro-cytidine
  modified_base 11: mod_base = OTHER; note = 2'-fluoro-adenosine
  modified_base 12: mod_base = OTHER; note = 2'-O-methyl-uridine
  modified_base 13: mod_base = OTHER; note = 2'-O-methyl-cytidine
  modified_base 14: mod_base = OTHER; note = 2'-O-methyl-uridine
  modified_base 15: mod_base = OTHER; note = 2'-O-methyl-adenosine
  modified_base 16: mod_base = OTHER; note = 2'-O-methyl-guanosine
  modified_base 17: mod_base = OTHER; note = 2'-O-methyl-adenosine
  modified_base 18: mod_base = OTHER; note = 2'-O-methyl-adenosine with phosphorothioate linkage
  modified_base 19: mod_base = OTHER; note = 2'-O-methyl-uridine with phosphorothioate linkage
  modified_base 20: mod_base = OTHER; note = 2'-O-methyl-adenosine conjugated to 3 iterations of (2R,3R,4R,5S)-5-(3-(5-(((2R,3R,4R,5R,6R)- 3-acetamido-4,5-dihydroxy-6-(hydroxymethyl)tetrahydro-2H-py ran-2-yl)oxy)pentanamido)propyl)-2-((hydroxyl)methyl)-4-met hoxytetrahydrofuran-3-oxyl
ggcatgtcacatctagaata

SEQ ID NO: 855 - RNA, 20 nt, synthetic construct
  source 1..20: mol_type = other RNA
  modified_base 1: mod_base = OTHER; note = 2'-O-methyl-guanosine with phosphorothioate linkage
  modified_base 2: mod_base = OTHER; note = 2'-O-methyl-cytidine with phosphorothioate linkage
  modified_base 3: mod_base = OTHER; note = 2'-O-methyl-adenosine
  modified_base 4: mod_base = OTHER; note = 2'-O-methyl-uridine
  modified_base 5: mod_base = OTHER; note = 2'-O-methyl-guanosine
  modified_base 6: mod_base = OTHER; note = 2'-fluoro-uridine
  modified_base 7: mod_base = OTHER; note = 2'-O-methyl-cytidine
  modified_base 8: mod_base = OTHER; note = 2'-fluoro-adenosine
  modified_base 9: mod_base = OTHER; note = 2'-fluoro-cytidine
  modified_base 10: mod_base = OTHER; note = 2'-fluoro-adenosine
  modified_base 11: mod_base = OTHER; note = 2'-fluoro-uridine
  modified_base 12: mod_base = OTHER; note = 2'-O-methyl-cytidine
  modified_base 13: mod_base = OTHER; note = 2'-O-methyl-uridine
  modified_base 14: mod_base = OTHER; note = 2'-O-methyl-adenosine
  modified_base 15: mod_base = OTHER; note = 2'-O-methyl-guanosine
  modified_base 16: mod_base = OTHER; note = 2'-O-methyl-adenosine
  modified_base 17: mod_base = OTHER; note = 2'-O-methyl-adenosine
  modified_base 18: mod_base = OTHER; note = 2'-O-methyl-uridine with phosphorothioate linkage
  modified_base 19: mod_base = OTHER; note = 2'-O-methyl-uridine with phosphorothioate linkage
  modified_base 20: mod_base = OTHER; note = 2'-O-methyl-adenosine conjugated to 3 iterations of (2R,3R,4R,5S)-5-(3-(5-(((2R,3R,4R,5R,6R)- 3-acetamido-4,5-dihydroxy-6-(hydroxymethyl)tetrahydro-2H-py ran-2-yl)oxy)pentanamido)propyl)-2-((hydroxyl)methyl)-4-met hoxytetrahydrofuran-3-oxyl
gcatgtcacatctagaatta

SEQ ID NO: 856 - RNA, 20 nt, synthetic construct
  source 1..20: mol_type = other RNA
  modified_base 1: mod_base = OTHER; note = 2'-O-methyl-cytidine with phosphorothioate linkage
  modified_base 2: mod_base = OTHER; note = 2'-O-methyl-uridine with phosphorothioate linkage
  modified_base 3: mod_base = OTHER; note = 2'-O-methyl-cytidine
  modified_base 4: mod_base = OTHER; note = 2'-O-methyl-uridine
  modified_base 5: mod_base = OTHER; note = 2'-O-methyl-uridine
  modified_base 6: mod_base = OTHER; note = 2'-fluoro-cytidine
  modified_base 7: mod_base = OTHER; note = 2'-O-methyl-uridine
  modified_base 8: mod_base = OTHER; note = 2'-fluoro-uridine
  modified_base 9: mod_base = OTHER; note = 2'-fluoro-adenosine
  modified_base 10: mod_base = OTHER; note = 2'-fluoro-uridine
  modified_base 11: mod_base = OTHER; note = 2'-fluoro-adenosine
  modified_base 12: mod_base = OTHER; note = 2'-O-methyl-cytidine
  modified_base 13: mod_base = OTHER; note = 2'-O-methyl-cytidine
  modified_base 14: mod_base = OTHER; note = 2'-O-methyl-uridine
  modified_base 15: mod_base = OTHER; note = 2'-O-methyl-adenosine
  modified_base 16: mod_base = OTHER; note = 2'-O-methyl-adenosine
  modified_base 17: mod_base = OTHER; note = 2'-O-methyl-guanosine
  modified_base 18: mod_base = OTHER; note = 2'-O-methyl-adenosine with phosphorothioate linkage
  modified_base 19: mod_base = OTHER; note = 2'-O-methyl-adenosine with phosphorothioate linkage
  modified_base 20: mod_base = OTHER; note = 2'-O-methyl-adenosine conjugated to 3 iterations of (2R,3R,4R,5S)-5-(3-(5-(((2R,3R,4R,5R,6R)- 3-acetamido-4,5-dihydroxy-6-(hydroxymethyl)tetrahydro-2H-py ran-2-yl)oxy)pentanamido)propyl)-2-((hydroxyl)methyl)-4-met hoxytetrahydrofuran-3-oxyl
ctcttcttatacctaagaaa

SEQ ID NO: 857 - RNA, 20 nt, synthetic construct
  source 1..20: mol_type = other RNA
  modified_base 1: mod_base = OTHER; note = 2'-O-methyl-cytidine with phosphorothioate linkage
  modified_base 2: mod_base = OTHER; note = 2'-O-methyl-uridine with phosphorothioate linkage
  modified_base 3: mod_base = OTHER; note = 2'-O-methyl-uridine
  modified_base 4: mod_base = OTHER; note = 2'-O-methyl-cytidine
  modified_base 5: mod_base = OTHER; note = 2'-O-methyl-uridine
  modified_base 6: mod_base = OTHER; note = 2'-fluoro-uridine
  modified_base 7: mod_base = OTHER; note = 2'-O-methyl-adenosine
  modified_base 8: mod_base = OTHER; note = 2'-fluoro-uridine
  modified_base 9: mod_base = OTHER; note = 2'-fluoro-adenosine
  modified_base 10: mod_base = OTHER; note = 2'-fluoro-cytidine
  modified_base 11: mod_base = OTHER; note = 2'-fluoro-cytidine
  modified_base 12: mod_base = OTHER; note = 2'-O-methyl-uridine
  modified_base 13: mod_base = OTHER; note = 2'-O-methyl-adenosine
  modified_base 14: mod_base = OTHER; note = 2'-O-methyl-adenosine
  modified_base 15: mod_base = OTHER; note = 2'-O-methyl-guanosine
  modified_base 16: mod_base = OTHER; note = 2'-O-methyl-adenosine
  modified_base 17: mod_base = OTHER; note = 2'-O-methyl-adenosine
  modified_base 18: mod_base = OTHER; note = 2'-O-methyl-cytidine with phosphorothioate linkage
  modified_base 19: mod_base = OTHER; note = 2'-O-methyl-adenosine with phosphorothioate linkage
  modified_base 20: mod_base = OTHER; note = 2'-O-methyl-adenosine conjugated to 3 iterations of (2R,3R,4R,5S)-5-(3-(5-(((2R,3R,4R,5R,6R)- 3-acetamido-4,5-dihydroxy-6-(hydroxymethyl)tetrahydro-2H-py ran-2-yl)oxy)pentanamido)propyl)-2-((hydroxyl)methyl)-4-met hoxytetrahydrofuran-3-oxyl
cttcttatacctaagaacaa

SEQ ID NO: 858 - RNA, 20 nt, synthetic construct
  source 1..20: mol_type = other RNA
  modified_base 1: mod_base = OTHER; note = 2'-O-methyl-guanosine with phosphorothioate linkage
  modified_base 2: mod_base = OTHER; note = 2'-O-methyl-cytidine with phosphorothioate linkage
  modified_base 3: mod_base = OTHER; note = 2'-O-methyl-cytidine
  modified_base 4: mod_base = OTHER; note = 2'-O-methyl-adenosine
  modified_base 5: mod_base = OTHER; note = 2'-O-methyl-adenosine
  modified_base 6: mod_base = OTHER; note = 2'-fluoro-cytidine
  modified_base 7: mod_base = OTHER; note = 2'-O-methyl-cytidine
  modified_base 8: mod_base = OTHER; note = 2'-fluoro-guanosine
  modified_base 9: mod_base = OTHER; note = 2'-fluoro-cytidine
  modified_base 10: mod_base = OTHER; note = 2'-fluoro-guanosine
  modified_base 11: mod_base = OTHER; note = 2'-fluoro-cytidine
  modified_base 12: mod_base = OTHER; note = 2'-O-methyl-adenosine
  modified_base 13: mod_base = OTHER; note = 2'-O-methyl-cytidine
  modified_base 14: mod_base = OTHER; note = 2'-O-methyl-uridine
  modified_base 15: mod_base = OTHER; note = 2'-O-methyl-uridine
  modified_base 16: mod_base = OTHER; note = 2'-O-methyl-cytidine
  modified_base 17: mod_base = OTHER; note = 2'-O-methyl-adenosine
  modified_base 18: mod_base = OTHER; note = 2'-O-methyl-adenosine with phosphorothioate linkage
  modified_base 19: mod_base = OTHER; note = 2'-O-methyl-adenosine with phosphorothioate linkage
  modified_base 20: mod_base = OTHER; note = 2'-O-methyl-adenosine conjugated to 3 iterations of (2R,3R,4R,5S)-5-(3-(5-(((2R,3R,4R,5R,6R)- 3-acetamido-4,5-dihydroxy-6-(hydroxymethyl)tetrahydro-2H-py ran-2-yl)oxy)pentanamido)propyl)-2-((hydroxyl)methyl)-4-met hoxytetrahydrofuran-3-oxyl
gccaaccgcgcacttcaaaa

SEQ ID NO: 859 - RNA, 20 nt, synthetic construct
  source 1..20: mol_type = other RNA
  modified_base 1: mod_base = OTHER; note = 2'-O-methyl-cytidine with phosphorothioate linkage
  modified_base 2: mod_base = OTHER; note = 2'-O-methyl-cytidine with phosphorothioate linkage
  modified_base 3: mod_base = OTHER; note = 2'-O-methyl-adenosine
  modified_base 4: mod_base = OTHER; note = 2'-O-methyl-adenosine
  modified_base 5: mod_base = OTHER; note = 2'-O-methyl-cytidine
  modified_base 6: mod_base = OTHER; note = 2'-fluoro-cytidine
  modified_base 7: mod_base = OTHER; note = 2'-O-methyl-guanosine
  modified_base 8: mod_base = OTHER; note = 2'-fluoro-cytidine
  modified_base 9: mod_base = OTHER; note = 2'-fluoro-guanosine
  modified_base 10: mod_base = OTHER; note = 2'-fluoro-cytidine
  modified_base 11: mod_base = OTHER; note = 2'-fluoro-adenosine
  modified_base 12: mod_base = OTHER; note = 2'-O-methyl-cytidine
  modified_base 13: mod_base = OTHER; note = 2'-O-methyl-uridine
  modified_base 14: mod_base = OTHER; note = 2'-O-methyl-uridine
  modified_base 15: mod_base = OTHER; note = 2'-O-methyl-cytidine
  modified_base 16: mod_base = OTHER; note = 2'-O-methyl-adenosine
  modified_base 17: mod_base = OTHER; note = 2'-O-methyl-adenosine
  modified_base 18: mod_base = OTHER; note = 2'-O-methyl-adenosine with phosphorothioate linkage
  modified_base 19: mod_base = OTHER; note = 2'-O-methyl-adenosine with phosphorothioate linkage
  modified_base 20: mod_base = OTHER; note = 2'-O-methyl-adenosine conjugated to 3 iterations of (2R,3R,4R,5S)-5-(3-(5-(((2R,3R,4R,5R,6R)- 3-acetamido-4,5-dihydroxy-6-(hydroxymethyl)tetrahydro-2H-py ran-2-yl)oxy)pentanamido)propyl)-2-((hydroxyl)methyl)-4-met hoxytetrahydrofuran-3-oxyl
ccaaccgcgcacttcaaaaa

SEQ ID NO: 860 - RNA, 20 nt, synthetic construct
  source 1..20: mol_type = other RNA
  modified_base 1: mod_base = OTHER; note = 2'-O-methyl-guanosine with phosphorothioate linkage
  modified_base 2: mod_base = OTHER; note = 2'-O-methyl-uridine with phosphorothioate linkage
  modified_base 3: mod_base = OTHER; note = 2'-O-methyl-guanosine
  modified_base 4: mod_base = OTHER; note = 2'-O-methyl-uridine
  modified_base 5: mod_base = OTHER; note = 2'-O-methyl-guanosine
  modified_base 6: mod_base = OTHER; note = 2'-fluoro-uridine
  modified_base 7: mod_base = OTHER; note = 2'-O-methyl-adenosine
  modified_base 8: mod_base = OTHER; note = 2'-fluoro-uridine
  modified_base 9: mod_base = OTHER; note = 2'-fluoro-guanosine
  modified_base 10: mod_base = OTHER; note = 2'-fluoro-uridine
  modified_base 11: mod_base = OTHER; note = 2'-fluoro-cytidine
  modified_base 12: mod_base = OTHER; note = 2'-O-methyl-uridine
  modified_base 13: mod_base = OTHER; note = 2'-O-methyl-uridine
  modified_base 14: mod_base = OTHER; note = 2'-O-methyl-uridine
  modified_base 15: mod_base = OTHER; note = 2'-O-methyl-uridine
  modified_base 16: mod_base = OTHER; note = 2'-O-methyl-guanosine
  modified_base 17: mod_base = OTHER; note = 2'-O-methyl-uridine
  modified_base 18: mod_base = OTHER; note = 2'-O-methyl-guanosine with phosphorothioate linkage
  modified_base 19: mod_base = OTHER; note = 2'-O-methyl-uridine with phosphorothioate linkage
  modified_base 20: mod_base = OTHER; note = 2'-O-methyl-adenosine conjugated to 3 iterations of (2R,3R,4R,5S)-5-(3-(5-(((2R,3R,4R,5R,6R)- 3-acetamido-4,5-dihydroxy-6-(hydroxymethyl)tetrahydro-2H-py ran-2-yl)oxy)pentanamido)propyl)-2-((hydroxyl)methyl)-4-met hoxytetrahydrofuran-3-oxyl
gtgtgtatgtcttttgtgta

SEQ ID NO: 861 - RNA, 20 nt, synthetic construct
  source 1..20: mol_type = other RNA
  modified_base 1: mod_base = OTHER; note = 2'-O-methyl-guanosine with phosphorothioate linkage
  modified_base 2: mod_base = OTHER; note = 2'-O-methyl-uridine with phosphorothioate linkage
  modified_base 3: mod_base = OTHER; note = 2'-O-methyl-adenosine
  modified_base 4: mod_base = OTHER; note = 2'-O-methyl-uridine
  modified_base 5: mod_base = OTHER; note = 2'-O-methyl-guanosine
  modified_base 6: mod_base = OTHER; note = 2'-fluoro-uridine
  modified_base 7: mod_base = OTHER; note = 2'-O-methyl-cytidine
  modified_base 8: mod_base = OTHER; note = 2'-fluoro-uridine
  modified_base 9: mod_base = OTHER; note = 2'-fluoro-uridine
  modified_base 10: mod_base = OTHER; note = 2'-fluoro-uridine
  modified_base 11: mod_base = OTHER; note = 2'-fluoro-uridine
  modified_base 12: mod_base = OTHER; note = 2'-O-methyl-guanosine
  modified_base 13: mod_base = OTHER; note = 2'-O-methyl-uridine
  modified_base 14: mod_base = OTHER; note = 2'-O-methyl-guanosine
  modified_base 15: mod_base = OTHER; note = 2'-O-methyl-uridine
  modified_base 16: mod_base = OTHER; note = 2'-O-methyl-guanosine
  modified_base 17: mod_base = OTHER; note = 2'-O-methyl-adenosine
  modified_base 18: mod_base = OTHER; note = 2'-O-methyl-uridine with phosphorothioate linkage
  modified_base 19: mod_base = OTHER; note = 2'-O-methyl-uridine with phosphorothioate linkage
  modified_base 20: mod_base = OTHER; note = 2'-O-methyl-adenosine conjugated to 3 iterations of (2R,3R,4R,5S)-5-(3-(5-(((2R,3R,4R,5R,6R)- 3-acetamido-4,5-dihydroxy-6-(hydroxymethyl)tetrahydro-2H-py ran-2-yl)oxy)pentanamido)propyl)-2-((hydroxyl)methyl)-4-met hoxytetrahydrofuran-3-oxyl
gtatgtcttttgtgtgatta

SEQ ID NO: 862 - RNA, 20 nt, synthetic construct
  source 1..20: mol_type = other RNA
  modified_base 1: mod_base = OTHER; note = 2'-O-methyl-cytidine with phosphorothioate linkage
  modified_base 2: mod_base = OTHER; note = 2'-O-methyl-uridine with phosphorothioate linkage
  modified_base 3: mod_base = OTHER; note = 2'-O-methyl-uridine
  modified_base 4: mod_base = OTHER; note = 2'-O-methyl-uridine
  modified_base 5: mod_base = OTHER; note = 2'-O-methyl-uridine
  modified_base 6: mod_base = OTHER; note = 2'-fluoro-guanosine
  modified_base 7: mod_base = OTHER; note = 2'-O-methyl-uridine
  modified_base 8: mod_base = OTHER; note = 2'-fluoro-guanosine
  modified_base 9: mod_base = OTHER; note = 2'-fluoro-uridine
  modified_base 10: mod_base = OTHER; note = 2'-fluoro-guanosine
  modified_base 11: mod_base = OTHER; note = 2'-fluoro-adenosine
  modified_base 12: mod_base = OTHER; note = 2'-O-methyl-uridine
  modified_base 13: mod_base = OTHER; note = 2'-O-methyl-uridine
  modified_base 14: mod_base = OTHER; note = 2'-O-methyl-cytidine
  modified_base 15: mod_base = OTHER; note = 2'-O-methyl-uridine
  modified_base 16: mod_base = OTHER; note = 2'-O-methyl-uridine
  modified_base 17: mod_base = OTHER; note = 2'-O-methyl-cytidine
  modified_base 18: mod_base = OTHER; note = 2'-O-methyl-adenosine with phosphorothioate linkage
  modified_base 19: mod_base = OTHER; note = 2'-O-methyl-adenosine with phosphorothioate linkage
  modified_base 20: mod_base = OTHER; note = 2'-O-methyl-adenosine conjugated to 3 iterations of (2R,3R,4R,5S)-5-(3-(5-(((2R,3R,4R,5R,6R)- 3-acetamido-4,5-dihydroxy-6-(hydroxymethyl)tetrahydro-2H-py ran-2-yl)oxy)pentanamido)propyl)-2-((hydroxyl)methyl)-4-met hoxytetrahydrofuran-3-oxyl
cttttgtgtgattcttcaaa

SEQ ID NO: 863 - RNA, 20 nt, synthetic construct
  source 1..20: mol_type = other RNA
  modified_base 1: mod_base = OTHER; note = 2'-O-methyl-cytidine with phosphorothioate linkage
  modified_base 2: mod_base = OTHER; note = 2'-O-methyl-adenosine with phosphorothioate linkage
  modified_base 3: mod_base = OTHER; note = 2'-O-methyl-uridine
  modified_base 4: mod_base = OTHER; note = 2'-O-methyl-cytidine
  modified_base 5: mod_base = OTHER; note = 2'-O-methyl-adenosine
  modified_base 6: mod_base = OTHER; note = 2'-fluoro-guanosine
  modified_base 7: mod_base = OTHER; note = 2'-O-methyl-uridine
  modified_base 8: mod_base = OTHER; note = 2'-fluoro-cytidine
  modified_base 9: mod_base = OTHER; note = 2'-fluoro-adenosine
  modified_base 10: mod_base = OTHER; note = 2'-fluoro-uridine
  modified_base 11: mod_base = OTHER; note = 2'-fluoro-guanosine
  modified_base 12: mod_base = OTHER; note = 2'-O-methyl-cytidine
  modified_base 13: mod_base = OTHER; note = 2'-O-methyl-uridine
  modified_base 14: mod_base = OTHER; note = 2'-O-methyl-adenosine
  modified_base 15: mod_base = OTHER; note = 2'-O-methyl-adenosine
  modified_base 16: mod_base = OTHER; note = 2'-O-methyl-cytidine
  modified_base 17: mod_base = OTHER; note = 2'-O-methyl-cytidine
  modified_base 18: mod_base = OTHER; note = 2'-O-methyl-adenosine with phosphorothioate linkage
  modified_base 19: mod_base = OTHER; note = 2'-O-methyl-adenosine with phosphorothioate linkage
  modified_base 20: mod_base = OTHER; note = 2'-O-methyl-adenosine conjugated to 3 iterations of (2R,3R,4R,5S)-5-(3-(5-(((2R,3R,4R,5R,6R)- 3-acetamido-4,5-dihydroxy-6-(hydroxymethyl)tetrahydro-2H-py ran-2-yl)oxy)pentanamido)propyl)-2-((hydroxyl)methyl)-4-met hoxytetrahydrofuran-3-oxyl
catcagtcatgctaaccaaa

SEQ ID NO: 864 - RNA, 20 nt, synthetic construct
  source 1..20: mol_type = other RNA
  modified_base 1: mod_base = OTHER; note = 2'-O-methyl-cytidine with phosphorothioate linkage
  modified_base 2: mod_base = OTHER; note = 2'-O-methyl-uridine with phosphorothioate linkage
  modified_base 3: mod_base = OTHER; note = 2'-O-methyl-cytidine
  modified_base 4: mod_base = OTHER; note = 2'-O-methyl-cytidine
  modified_base 5: mod_base = OTHER; note = 2'-O-methyl-cytidine
  modified_base 6: mod_base = OTHER; note = 2'-fluoro-uridine
  modified_base 7: mod_base = OTHER; note = 2'-O-methyl-uridine
  modified_base 8: mod_base = OTHER; note = 2'-fluoro-cytidine
  modified_base 9: mod_base = OTHER; note = 2'-fluoro-cytidine
  modified_base 10: mod_base = OTHER; note = 2'-fluoro-adenosine
  modified_base 11: mod_base = OTHER; note = 2'-fluoro-guanosine
  modified_base 12: mod_base = OTHER; note = 2'-O-methyl-adenosine
  modified_base 13: mod_base = OTHER; note = 2'-O-methyl-adenosine
  modified_base 14: mod_base = OTHER; note = 2'-O-methyl-cytidine
  modified_base 15: mod_base = OTHER; note = 2'-O-methyl-uridine
  modified_base 16: mod_base = OTHER; note = 2'-O-methyl-guanosine
  modified_base 17: mod_base = OTHER; note = 2'-O-methyl-adenosine
  modified_base 18: mod_base = OTHER; note = 2'-O-methyl-adenosine with phosphorothioate linkage
  modified_base 19: mod_base = OTHER; note = 2'-O-methyl-uridine with phosphorothioate linkage
  modified_base 20: mod_base = OTHER; note = 2'-O-methyl-adenosine conjugated to 3 iterations of (2R,3R,4R,5S)-5-(3-(5-(((2R,3R,4R,5R,6R)- 3-acetamido-4,5-dihydroxy-6-(hydroxymethyl)tetrahydro-2H-py ran-2-yl)oxy)pentanamido)propyl)-2-((hydroxyl)methyl)-4-met hoxytetrahydrofuran-3-oxyl
ctcccttccagaactgaata

SEQ ID NO: 865 - RNA, 20 nt, synthetic construct
  source 1..20: mol_type = other RNA
  modified_base 1: mod_base = OTHER; note = 2'-O-methyl-guanosine with phosphorothioate linkage
  modified_base 2: mod_base = OTHER; note = 2'-O-methyl-cytidine with phosphorothioate linkage
  modified_base 3: mod_base = OTHER; note = 2'-O-methyl-uridine
  modified_base 4: mod_base = OTHER; note = 2'-O-methyl-uridine
  modified_base 5: mod_base = OTHER; note = 2'-O-methyl-cytidine
  modified_base 6: mod_base = OTHER; note = 2'-fluoro-adenosine
  modified_base 7: mod_base = OTHER; note = 2'-O-methyl-cytidine
  modified_base 8: mod_base = OTHER; note = 2'-fluoro-adenosine
  modified_base 9: mod_base = OTHER; note = 2'-fluoro-guanosine
  modified_base 10: mod_base = OTHER; note = 2'-fluoro-adenosine
  modified_base 11: mod_base = OTHER; note = 2'-fluoro-uridine
  modified_base 12: mod_base = OTHER; note = 2'-O-methyl-uridine
  modified_base 13: mod_base = OTHER; note = 2'-O-methyl-uridine
  modified_base 14: mod_base = OTHER; note = 2'-O-methyl-uridine
  modified_base 15: mod_base = OTHER; note = 2'-O-methyl-uridine
  modified_base 16: mod_base = OTHER; note = 2'-O-methyl-guanosine
  modified_base 17: mod_base = OTHER; note = 2'-O-methyl-cytidine
  modified_base 18: mod_base = OTHER; note = 2'-O-methyl-adenosine with phosphorothioate linkage
  modified_base 19: mod_base = OTHER; note = 2'-O-methyl-adenosine with phosphorothioate linkage
  modified_base 20: mod_base = OTHER; note = 2'-O-methyl-adenosine conjugated to 3 iterations of (2R,3R,4R,5S)-5-(3-(5-(((2R,3R,4R,5R,6R)- 3-acetamido-4,5-dihydroxy-6-(hydroxymethyl)tetrahydro-2H-py ran-2-yl)oxy)pentanamido)propyl)-2-((hydroxyl)methyl)-4-met hoxytetrahydrofuran-3-oxyl
gcttcacagatttttgcaaa

SEQ ID NO: 866 - RNA, 20 nt, synthetic construct
  source 1..20: mol_type = other RNA
  modified_base 1: mod_base = OTHER; note = 2'-O-methyl-cytidine with phosphorothioate linkage
  modified_base 2: mod_base = OTHER; note = 2'-O-methyl-adenosine with phosphorothioate linkage
  modified_base 3: mod_base = OTHER; note = 2'-O-methyl-guanosine
  modified_base 4: mod_base = OTHER; note = 2'-O-methyl-adenosine
  modified_base 5: mod_base = OTHER; note = 2'-O-methyl-uridine
  modified_base 6: mod_base = OTHER; note = 2'-fluoro-uridine
  modified_base 7: mod_base = OTHER; note = 2'-O-methyl-uridine
  modified_base 8: mod_base = OTHER; note = 2'-fluoro-uridine
  modified_base 9: mod_base = OTHER; note = 2'-fluoro-uridine
  modified_base 10: mod_base = OTHER; note = 2'-fluoro-guanosine
  modified_base 11: mod_base = OTHER; note = 2'-fluoro-cytidine
  modified_base 12: mod_base = OTHER; note = 2'-O-methyl-adenosine
  modified_base 13: mod_base = OTHER; note = 2'-O-methyl-adenosine
  modified_base 14: mod_base = OTHER; note = 2'-O-methyl-cytidine
  modified_base 15: mod_base = OTHER; note = 2'-O-methyl-adenosine
  modified_base 16: mod_base = OTHER; note = 2'-O-methyl-adenosine
  modified_base 17: mod_base = OTHER; note = 2'-O-methyl-cytidine
  modified_base 18: mod_base = OTHER; note = 2'-O-methyl-adenosine with phosphorothioate linkage
  modified_base 19: mod_base = OTHER; note = 2'-O-methyl-uridine with phosphorothioate linkage
  modified_base 20: mod_base = OTHER; note = 2'-O-methyl-adenosine conjugated to 3 iterations of (2R,3R,4R,5S)-5-(3-(5-(((2R,3R,4R,5R,6R)- 3-acetamido-4,5-dihydroxy-6-(hydroxymethyl)tetrahydro-2H-py ran-2-yl)oxy)pentanamido)propyl)-2-((hydroxyl)methyl)-4-met hoxytetrahydrofuran-3-oxyl
cagatttttgcaacaacata

SEQ ID NO: 867 - RNA, 20 nt, synthetic construct
  source 1..20: mol_type = other RNA
  modified_base 1: mod_base = OTHER; note = 2'-O-methyl-cytidine with phosphorothioate linkage
  modified_base 2: mod_base = OTHER; note = 2'-O-methyl-adenosine with phosphorothioate linkage
  modified_base 3: mod_base = OTHER; note = 2'-O-methyl-uridine
  modified_base 4: mod_base = OTHER; note = 2'-O-methyl-guanosine
  modified_base 5: mod_base = OTHER; note = 2'-O-methyl-guanosine
  modified_base 6: mod_base = OTHER; note = 2'-fluoro-adenosine
  modified_base 7: mod_base = OTHER; note = 2'-O-methyl-guanosine
  modified_base 8: mod_base = OTHER; note = 2'-fluoro-cytidine
  modified_base 9: mod_base = OTHER; note = 2'-fluoro-uridine
  modified_base 10: mod_base = OTHER; note = 2'-fluoro-guanosine
  modified_base 11: mod_base = OTHER; note = 2'-fluoro-guanosine
  modified_base 12: mod_base = OTHER; note = 2'-O-methyl-cytidine
  modified_base 13: mod_base = OTHER; note = 2'-O-methyl-cytidine
  modified_base 14: mod_base = OTHER; note = 2'-O-methyl-adenosine
  modified_base 15: mod_base = OTHER; note = 2'-O-methyl-uridine
  modified_base 16: mod_base = OTHER; note = 2'-O-methyl-cytidine
  modified_base 17: mod_base = OTHER; note = 2'-O-methyl-adenosine
  modified_base 18: mod_base = OTHER; note = 2'-O-methyl-uridine with phosphorothioate linkage
  modified_base 19: mod_base = OTHER; note = 2'-O-methyl-uridine with phosphorothioate linkage
  modified_base 20: mod_base = OTHER; note = 2'-O-methyl-adenosine conjugated to 3 iterations of (2R,3R,4R,5S)-5-(3-(5-(((2R,3R,4R,5R,6R)- 3-acetamido-4,5-dihydroxy-6-(hydroxymethyl)tetrahydro-2H-py ran-2-yl)oxy)pentanamido)propyl)-2-((hydroxyl)methyl)-4-met hoxytetrahydrofuran-3-oxyl
catggagctggccatcatta

SEQ ID NO: 868 - RNA, 20 nt, synthetic construct
  source 1..20: mol_type = other RNA
  modified_base 1: mod_base = OTHER; note = 2'-O-methyl-guanosine with phosphorothioate linkage
  modified_base 2: mod_base = OTHER; note = 2'-O-methyl-guanosine with phosphorothioate linkage
  modified_base 3: mod_base = OTHER; note = 2'-O-methyl-adenosine
  modified_base 4: mod_base = OTHER; note = 2'-O-methyl-guanosine
  modified_base 5: mod_base = OTHER; note = 2'-O-methyl-cytidine
  modified_base 6: mod_base = OTHER; note = 2'-fluoro-uridine
  modified_base 7: mod_base = OTHER; note = 2'-O-methyl-guanosine
  modified_base 8: mod_base = OTHER; note = 2'-fluoro-guanosine
  modified_base 9: mod_base = OTHER; note = 2'-fluoro-cytidine
  modified_base 10: mod_base = OTHER; note = 2'-fluoro-cytidine
  modified_base 11: mod_base = OTHER; note = 2'-fluoro-adenosine
  modified_base 12: mod_base = OTHER; note = 2'-O-methyl-uridine
  modified_base 13: mod_base = OTHER; note = 2'-O-methyl-cytidine
  modified_base 14: mod_base = OTHER; note = 2'-O-methyl-adenosine
  modified_base 15: mod_base = OTHER; note = 2'-O-methyl-uridine
  modified_base 16: mod_base = OTHER; note = 2'-O-methyl-uridine
  modified_base 17: mod_base = OTHER; note = 2'-O-methyl-adenosine
  modified_base 18: mod_base = OTHER; note = 2'-O-methyl-uridine with phosphorothioate linkage
  modified_base 19: mod_base = OTHER; note = 2'-O-methyl-uridine with phosphorothioate linkage
  modified_base 20: mod_base = OTHER; note = 2'-O-methyl-adenosine conjugated to 3 iterations of (2R,3R,4R,5S)-5-(3-(5-(((2R,3R,4R,5R,6R)- 3-acetamido-4,5-dihydroxy-6-(hydroxymethyl)tetrahydro-2H-py ran-2-yl)oxy)pentanamido)propyl)-2-((hydroxyl)methyl)-4-met hoxytetrahydrofuran-3-oxyl
ggagctggccatcattatta

SEQ ID NO: 869 - RNA, 20 nt, synthetic construct
  source 1..20: mol_type = other RNA
  modified_base 1: mod_base = OTHER; note = 2'-O-methyl-guanosine with phosphorothioate linkage
  modified_base 2: mod_base = OTHER; note = 2'-O-methyl-uridine with phosphorothioate linkage
  modified_base 3: mod_base = OTHER; note = 2'-O-methyl-guanosine
  modified_base 4: mod_base = OTHER; note = 2'-O-methyl-cytidine
  modified_base 5: mod_base = OTHER; note = 2'-O-methyl-uridine
  modified_base 6: mod_base = OTHER; note = 2'-fluoro-cytidine
  modified_base 7: mod_base = OTHER; note = 2'-O-methyl-cytidine
  modified_base 8: mod_base = OTHER; note = 2'-fluoro-uridine
  modified_base 9: mod_base = OTHER; note = 2'-fluoro-adenosine
  modified_base 10: mod_base = OTHER; note = 2'-fluoro-cytidine
  modified_base 11: mod_base = OTHER; note = 2'-fluoro-adenosine
  modified_base 12: mod_base = OTHER; note = 2'-O-methyl-guanosine
  modified_base 13: mod_base = OTHER; note = 2'-O-methyl-guanosine
  modified_base 14: mod_base = OTHER; note = 2'-O-methyl-adenosine
  modified_base 15: mod_base = OTHER; note = 2'-O-methyl-adenosine
  modified_base 16: mod_base = OTHER; note = 2'-O-methyl-guanosine
  modified_base 17: mod_base = OTHER; note = 2'-O-methyl-adenosine
  modified_base 18: mod_base = OTHER; note = 2'-O-methyl-adenosine with phosphorothioate linkage
  modified_base 19: mod_base = OTHER; note = 2'-O-methyl-adenosine with phosphorothioate linkage
  modified_base 20: mod_base = OTHER; note = 2'-O-methyl-adenosine conjugated to 3 iterations of (2R,3R,4R,5S)-5-(3-(5-(((2R,3R,4R,5R,6R)- 3-acetamido-4,5-dihydroxy-6-(hydroxymethyl)tetrahydro-2H-py ran-2-yl)oxy)pentanamido)propyl)-2-((hydroxyl)methyl)-4-met hoxytetrahydrofuran-3-oxyl
gtgctcctacaggaagaaaa

SEQ ID NO: 870 - RNA, 20 nt, synthetic construct
  source 1..20: mol_type = other RNA
  modified_base 1: mod_base = OTHER; note = 2'-O-methyl-guanosine with phosphorothioate linkage
  modified_base 2: mod_base = OTHER; note = 2'-O-methyl-cytidine with phosphorothioate linkage
  modified_base 3: mod_base = OTHER; note = 2'-O-methyl-uridine
  modified_base 4: mod_base = OTHER; note = 2'-O-methyl-cytidine
  modified_base 5: mod_base = OTHER; note = 2'-O-methyl-cytidine
  modified_base 6: mod_base = OTHER; note = 2'-fluoro-uridine
  modified_base 7: mod_base = OTHER; note = 2'-O-methyl-adenosine
  modified_base 8: mod_base = OTHER; note = 2'-fluoro-cytidine
  modified_base 9: mod_base = OTHER; note = 2'-fluoro-adenosine
  modified_base 10: mod_base = OTHER; note = 2'-fluoro-guanosine
  modified_base 11: mod_base = OTHER; note = 2'-fluoro-guanosine
  modified_base 12: mod_base = OTHER; note = 2'-O-methyl-adenosine
  modified_base 13: mod_base = OTHER; note = 2'-O-methyl-adenosine
  modified_base 14: mod_base = OTHER; note = 2'-O-methyl-guanosine
  modified_base 15: mod_base = OTHER; note = 2'-O-methyl-adenosine
  modified_base 16: mod_base = OTHER; note = 2'-O-methyl-adenosine
  modified_base 17: mod_base = OTHER; note = 2'-O-methyl-adenosine
  modified_base 18: mod_base = OTHER; note = 2'-O-methyl-adenosine with phosphorothioate linkage
  modified_base 19: mod_base = OTHER; note = 2'-O-methyl-adenosine with phosphorothioate linkage
  modified_base 20: mod_base = OTHER; note = 2'-O-methyl-adenosine conjugated to 3 iterations of (2R,3R,4R,5S)-5-(3-(5-(((2R,3R,4R,5R,6R)- 3-acetamido-4,5-dihydroxy-6-(hydroxymethyl)tetrahydro-2H-py ran-2-yl)oxy)pentanamido)propyl)-2-((hydroxyl)methyl)-4-met hoxytetrahydrofuran-3-oxyl
gctcctacaggaagaaaaaa

SEQ ID NO: 871 - RNA, 20 nt, synthetic construct
  source 1..20: mol_type = other RNA
  modified_base 1: mod_base = OTHER; note = 2'-O-methyl-cytidine with phosphorothioate linkage
  modified_base 2: mod_base = OTHER; note = 2'-O-methyl-uridine with phosphorothioate linkage
  modified_base 3: mod_base = OTHER; note = 2'-O-methyl-guanosine
  modified_base 4: mod_base = OTHER; note = 2'-O-methyl-adenosine
  modified_base 5: mod_base = OTHER; note = 2'-O-methyl-guanosine
  modified_base 6: mod_base = OTHER; note = 2'-fluoro-uridine
  modified_base 7: mod_base = OTHER; note = 2'-O-methyl-guanosine
  modified_base 8: mod_base = OTHER; note = 2'-fluoro-cytidine
  modified_base 9: mod_base = OTHER; note = 2'-fluoro-adenosine
  modified_base 10: mod_base = OTHER; note = 2'-fluoro-adenosine
  modified_base 11: mod_base = OTHER; note = 2'-fluoro-uridine
  modified_base 12: mod_base = OTHER; note = 2'-O-methyl-cytidine
  modified_base 13: mod_base = OTHER; note = 2'-O-methyl-uridine
  modified_base 14: mod_base = OTHER; note = 2'-O-methyl-guanosine
  modified_base 15: mod_base = OTHER; note = 2'-O-methyl-guanosine
  modified_base 16: mod_base = OTHER; note = 2'-O-methyl-uridine
  modified_base 17: mod_base = OTHER; note = 2'-O-methyl-adenosine
  modified_base 18: mod_base = OTHER; note = 2'-O-methyl-adenosine with phosphorothioate linkage
  modified_base 19: mod_base = OTHER; note = 2'-O-methyl-adenosine with phosphorothioate linkage
  modified_base 20: mod_base = OTHER; note = 2'-O-methyl-adenosine conjugated to 3 iterations of (2R,3R,4R,5S)-5-(3-(5-(((2R,3R,4R,5R,6R)- 3-acetamido-4,5-dihydroxy-6-(hydroxymethyl)tetrahydro-2H-py ran-2-yl)oxy)pentanamido)propyl)-2-((hydroxyl)methyl)-4-met hoxytetrahydrofuran-3-oxyl
ctgagtgcaatctggtaaaa

SEQ ID NO: 872 - RNA, 20 nt, synthetic construct
  source 1..20: mol_type = other RNA
  modified_base 1: mod_base = OTHER; note = 2'-O-methyl-guanosine with phosphorothioate linkage
  modified_base 2: mod_base = OTHER; note = 2'-O-methyl-uridine with phosphorothioate linkage
  modified_base 3: mod_base = OTHER; note = 2'-O-methyl-guanosine
  modified_base 4: mod_base = OTHER; note = 2'-O-methyl-cytidine
  modified_base 5: mod_base = OTHER; note = 2'-O-methyl-adenosine
  modified_base 6: mod_base = OTHER; note = 2'-fluoro-adenosine
  modified_base 7: mod_base = OTHER; note = 2'-O-methyl-uridine
  modified_base 8: mod_base = OTHER; note = 2'-fluoro-cytidine
  modified_base 9: mod_base = OTHER; note = 2'-fluoro-uridine
  modified_base 10: mod_base = OTHER; note = 2'-fluoro-guanosine
  modified_base 11: mod_base = OTHER; note = 2'-fluoro-guanosine
  modified_base 12: mod_base = OTHER; note = 2'-O-methyl-uridine
  modified_base 13: mod_base = OTHER; note = 2'-O-methyl-adenosine
  modified_base 14: mod_base = OTHER; note = 2'-O-methyl-adenosine
  modified_base 15: mod_base = OTHER; note = 2'-O-methyl-adenosine
  modified_base 16: mod_base = OTHER; note = 2'-O-methyl-uridine
  modified_base 17: mod_base = OTHER; note = 2'-O-methyl-guanosine
  modified_base 18: mod_base = OTHER; note = 2'-O-methyl-cytidine with phosphorothioate linkage
  modified_base 19: mod_base = OTHER; note = 2'-O-methyl-uridine with phosphorothioate linkage
  modified_base 20: mod_base = OTHER; note = 2'-O-methyl-adenosine conjugated to 3 iterations of (2R,3R,4R,5S)-5-(3-(5-(((2R,3R,4R,5R,6R)- 3-acetamido-4,5-dihydroxy-6-(hydroxymethyl)tetrahydro-2H-py ran-2-yl)oxy)pentanamido)propyl)-2-((hydroxyl)methyl)-4-met hoxytetrahydrofuran-3-oxyl
gtgcaatctggtaaatgcta

SEQ ID NO: 873 - RNA, 20 nt, synthetic construct
  source 1..20: mol_type = other RNA
  modified_base 1: mod_base = OTHER; note = 2'-O-methyl-cytidine with phosphorothioate linkage
  modified_base 2: mod_base = OTHER; note = 2'-O-methyl-uridine with phosphorothioate linkage
  modified_base 3: mod_base = OTHER; note = 2'-O-methyl-adenosine
  modified_base 4: mod_base = OTHER; note = 2'-O-methyl-cytidine
  modified_base 5: mod_base = OTHER; note = 2'-O-methyl-cytidine
  modified_base 6: mod_base = OTHER; note = 2'-fluoro-uridine
  modified_base 7: mod_base = OTHER; note = 2'-O-methyl-cytidine
  modified_base 8: mod_base = OTHER; note = 2'-fluoro-uridine
  modified_base 9: mod_base = OTHER; note = 2'-fluoro-guanosine
  modified_base 10: mod_base = OTHER; note = 2'-fluoro-uridine
  modified_base 11: mod_base = OTHER; note = 2'-fluoro-uridine
  modified_base 12: mod_base = OTHER; note = 2'-O-methyl-guanosine
  modified_base 13: mod_base = OTHER; note = 2'-O-methyl-guanosine
  modified_base 14: mod_base = OTHER; note = 2'-O-methyl-uridine
  modified_base 15: mod_base = OTHER; note = 2'-O-methyl-uridine
  modified_base 16: mod_base = OTHER; note = 2'-O-methyl-cytidine
  modified_base 17: mod_base = OTHER; note = 2'-O-methyl-adenosine
  modified_base 18: mod_base = OTHER; note = 2'-O-methyl-adenosine with phosphorothioate linkage
  modified_base 19: mod_base = OTHER; note = 2'-O-methyl-adenosine with phosphorothioate linkage
  modified_base 20: mod_base = OTHER; note = 2'-O-methyl-adenosine conjugated to 3 iterations of (2R,3R,4R,5S)-5-(3-(5-(((2R,3R,4R,5R,6R)- 3-acetamido-4,5-dihydroxy-6-(hydroxymethyl)tetrahydro-2H-py ran-2-yl)oxy)pentanamido)propyl)-2-((hydroxyl)methyl)-4-met hoxytetrahydrofuran-3-oxyl
ctacctctgttggttcaaaa

SEQ ID NO: 874 - RNA, 20 nt, synthetic construct
  source 1..20: mol_type = other RNA
  modified_base 1: mod_base = OTHER; note = 2'-O-methyl-cytidine with phosphorothioate linkage
  modified_base 2: mod_base = OTHER; note = 2'-O-methyl-adenosine with phosphorothioate linkage
  modified_base 3: mod_base = OTHER; note = 2'-O-methyl-adenosine
  modified_base 4: mod_base = OTHER; note = 2'-O-methyl-uridine
  modified_base 5: mod_base = OTHER; note = 2'-O-methyl-uridine
  modified_base 6: mod_base = OTHER; note = 2'-fluoro-guanosine
  modified_base 7: mod_base = OTHER; note = 2'-O-methyl-cytidine
  modified_base 8: mod_base = OTHER; note = 2'-fluoro-adenosine
  modified_base 9: mod_base = OTHER; note = 2'-fluoro-adenosine
  modified_base 10: mod_base = OTHER; note = 2'-fluoro-guanosine
  modified_base 11: mod_base = OTHER; note = 2'-fluoro-guanosine
  modified_base 12: mod_base = OTHER; note = 2'-O-methyl-adenosine
  modified_base 13: mod_base = OTHER; note = 2'-O-methyl-cytidine
  modified_base 14: mod_base = OTHER; note = 2'-O-methyl-guanosine
  modified_base 15: mod_base = OTHER; note = 2'-O-methyl-adenosine
  modified_base 16: mod_base = OTHER; note = 2'-O-methyl-uridine
  modified_base 17: mod_base = OTHER; note = 2'-O-methyl-uridine
  modified_base 18: mod_base = OTHER; note = 2'-O-methyl-guanosine with phosphorothioate linkage
  modified_base 19: mod_base = OTHER; note = 2'-O-methyl-uridine with phosphorothioate linkage
  modified_base 20: mod_base = OTHER; note = 2'-O-methyl-adenosine conjugated to 3 iterations of (2R,3R,4R,5S)-5-(3-(5-(((2R,3R,4R,5R,6R)- 3-acetamido-4,5-dihydroxy-6-(hydroxymethyl)tetrahydro-2H-py ran-2-yl)oxy)pentanamido)propyl)-2-((hydroxyl)methyl)-4-met hoxytetrahydrofuran-3-oxyl
caattgcaaggacgattgta

SEQ ID NO: 875 - RNA, 20 nt, synthetic construct
  source 1..20: mol_type = other RNA
  modified_base 1: mod_base = OTHER; note = 2'-O-methyl-guanosine with phosphorothioate linkage
  modified_base 2: mod_base = OTHER; note = 2'-O-methyl-adenosine with phosphorothioate linkage
  modified_base 3: mod_base = OTHER; note = 2'-O-methyl-adenosine
  modified_base 4: mod_base = OTHER; note = 2'-O-methyl-adenosine
  modified_base 5: mod_base = OTHER; note = 2'-O-methyl-uridine
  modified_base 6: mod_base = OTHER; note = 2'-fluoro-adenosine
  modified_base 7: mod_base = OTHER; note = 2'-O-methyl-guanosine
  modified_base 8: mod_base = OTHER; note = 2'-fluoro-uridine
  modified_base 9: mod_base = OTHER; note = 2'-fluoro-adenosine
  modified_base 10: mod_base = OTHER; note = 2'-fluoro-guanosine
  modified_base 11: mod_base = OTHER; note = 2'-fluoro-guanosine
  modified_base 12: mod_base = OTHER; note = 2'-O-methyl-adenosine
  modified_base 13: mod_base = OTHER; note = 2'-O-methyl-adenosine
  modified_base 14: mod_base = OTHER; note = 2'-O-methyl-adenosine
  modified_base 15: mod_base = OTHER; note = 2'-O-methyl-adenosine
  modified_base 16: mod_base = OTHER; note = 2'-O-methyl-guanosine
  modified_base 17: mod_base = OTHER; note = 2'-O-methyl-guanosine
  modified_base 18: mod_base = OTHER; note = 2'-O-methyl-uridine with phosphorothioate linkage
  modified_base 19: mod_base = OTHER; note = 2'-O-methyl-adenosine with phosphorothioate linkage
  modified_base 20: mod_base = OTHER; note = 2'-O-methyl-adenosine conjugated to 3 iterations of (2R,3R,4R,5S)-5-(3-(5-(((2R,3R,4R,5R,6R)- 3-acetamido-4,5-dihydroxy-6-(hydroxymethyl)tetrahydro-2H-py ran-2-yl)oxy)pentanamido)propyl)-2-((hydroxyl)methyl)-4-met hoxytetrahydrofuran-3-oxyl
gaaatagtaggaaaaggtaa

SEQ ID NO: 876 - RNA, 20 nt, synthetic construct
  source 1..20: mol_type = other RNA
  modified_base 1: mod_base = OTHER; note = 2'-O-methyl-guanosine with phosphorothioate linkage
  modified_base 2: mod_base = OTHER; note = 2'-O-methyl-guanosine with phosphorothioate linkage
  modified_base 3: mod_base = OTHER; note = 2'-O-methyl-adenosine
  modified_base 4: mod_base = OTHER; note = 2'-O-methyl-adenosine
  modified_base 5: mod_base = OTHER; note = 2'-O-methyl-guanosine
  modified_base 6: mod_base = OTHER; note = 2'-fluoro-adenosine
  modified_base 7: mod_base = OTHER; note = 2'-O-methyl-uridine
  modified_base 8: mod_base = OTHER; note = 2'-fluoro-guanosine
  modified_base 9: mod_base = OTHER; note = 2'-fluoro-uridine
  modified_base 10: mod_base = OTHER; note = 2'-fluoro-guanosine
  modified_base 11: mod_base = OTHER; note = 2'-fluoro-guanosine
  modified_base 12: mod_base = OTHER; note = 2'-O-methyl-cytidine
  modified_base 13: mod_base = OTHER; note = 2'-O-methyl-uridine
  modified_base 14: mod_base = OTHER; note = 2'-O-methyl-guanosine
  modified_base 15: mod_base = OTHER; note = 2'-O-methyl-uridine
  modified_base 16: mod_base = OTHER; note = 2'-O-methyl-guanosine
  modified_base 17: mod_base = OTHER; note = 2'-O-methyl-adenosine
  modified_base 18: mod_base = OTHER; note = 2'-O-methyl-adenosine with phosphorothioate linkage
  modified_base 19: mod_base = OTHER; note = 2'-O-methyl-adenosine with phosphorothioate linkage
  modified_base 20: mod_base = OTHER; note = 2'-O-methyl-adenosine conjugated to 3 iterations of (2R,3R,4R,5S)-5-(3-(5-(((2R,3R,4R,5R,6R)- 3-acetamido-4,5-dihydroxy-6-(hydroxymethyl)tetrahydro-2H-py ran-2-yl)oxy)pentanamido)propyl)-2-((hydroxyl)methyl)-4-met hoxytetrahydrofuran-3-oxyl
ggaagatgtggctgtgaaaa

SEQ ID NO: 877 - RNA, 20 nt, synthetic construct
  source 1..20: mol_type = other RNA
  modified_base 1: mod_base = OTHER; note = 2'-O-methyl-cytidine with phosphorothioate linkage
  modified_base 2: mod_base = OTHER; note = 2'-O-methyl-uridine with phosphorothioate linkage
  modified_base 3: mod_base = OTHER; note = 2'-O-methyl-cytidine
  modified_base 4: mod_base = OTHER; note = 2'-O-methyl-cytidine
  modified_base 5: mod_base = OTHER; note = 2'-O-methyl-uridine
  modified_base 6: mod_base = OTHER; note = 2'-fluoro-cytidine
  modified_base 7: mod_base = OTHER; note = 2'-O-methyl-cytidine
  modified_base 8: mod_base = OTHER; note = 2'-fluoro-adenosine
  modified_base 9: mod_base = OTHER; note = 2'-fluoro-guanosine
  modified_base 10: mod_base = OTHER; note = 2'-fluoro-adenosine
  modified_base 11: mod_base = OTHER; note = 2'-fluoro-guanosine
  modified_base 12: mod_base = OTHER; note = 2'-O-methyl-adenosine
  modified_base 13: mod_base = OTHER; note = 2'-O-methyl-uridine
  modified_base 14: mod_base = OTHER; note = 2'-O-methyl-guanosine
  modified_base 15: mod_base = OTHER; note = 2'-O-methyl-adenosine
  modified_base 16: mod_base = OTHER; note = 2'-O-methyl-adenosine
  modified_base 17: mod_base = OTHER; note = 2'-O-methyl-adenosine
  modified_base 18: mod_base = OTHER; note = 2'-O-methyl-guanosine with phosphorothioate linkage
  modified_base 19: mod_base = OTHER; note = 2'-O-methyl-adenosine with phosphorothioate linkage
  modified_base 20: mod_base = OTHER; note = 2'-O-methyl-adenosine conjugated to 3 iterations of (2R,3R,4R,5S)-5-(3-(5-(((2R,3R,4R,5R,6R)- 3-acetamido-4,5-dihydroxy-6-(hydroxymethyl)tetrahydro-2H-py ran-2-yl)oxy)pentanamido)propyl)-2-((hydroxyl)methyl)-4-met hoxytetrahydrofuran-3-oxyl
ctcctccagagatgaaagaa

SEQ ID NO: 878 - RNA, 20 nt, synthetic construct
  source 1..20: mol_type = other RNA
  modified_base 1: mod_base = OTHER; note = 2'-O-methyl-cytidine with phosphorothioate linkage
  modified_base 2: mod_base = OTHER; note = 2'-O-methyl-uridine with phosphorothioate linkage
  modified_base 3: mod_base = OTHER; note = 2'-O-methyl-cytidine
  modified_base 4: mod_base = OTHER; note = 2'-O-methyl-cytidine
  modified_base 5: mod_base = OTHER; note = 2'-O-methyl-adenosine
  modified_base 6: mod_base = OTHER; note = 2'-fluoro-guanosine
  modified_base 7: mod_base = OTHER; note = 2'-O-methyl-adenosine
  modified_base 8: mod_base = OTHER; note = 2'-fluoro-guanosine
  modified_base 9: mod_base = OTHER; note = 2'-fluoro-adenosine
  modified_base 10: mod_base = OTHER; note = 2'-fluoro-uridine
  modified_base 11: mod_base = OTHER; note = 2'-fluoro-guanosine
  modified_base 12: mod_base = OTHER; note = 2'-O-methyl-adenosine
  modified_base 13: mod_base = OTHER; note = 2'-O-methyl-adenosine
  modified_base 14: mod_base = OTHER; note = 2'-O-methyl-adenosine
  modified_base 15: mod_base = OTHER; note = 2'-O-methyl-guanosine
  modified_base 16: mod_base = OTHER; note = 2'-O-methyl-adenosine
  modified_base 17: mod_base = OTHER; note = 2'-O-methyl-uridine
  modified_base 18: mod_base = OTHER; note = 2'-O-methyl-cytidine with phosphorothioate linkage
  modified_base 19: mod_base = OTHER; note = 2'-O-methyl-uridine with phosphorothioate linkage
  modified_base 20: mod_base = OTHER; note = 2'-O-methyl-adenosine conjugated to 3 iterations of (2R,3R,4R,5S)-5-(3-(5-(((2R,3R,4R,5R,6R)- 3-acetamido-4,5-dihydroxy-6-(hydroxymethyl)tetrahydro-2H-py ran-2-yl)oxy)pentanamido)propyl)-2-((hydroxyl)methyl)-4-met hoxytetrahydrofuran-3-oxyl
ctccagagatgaaagatcta

SEQ ID NO: 879 - RNA, 20 nt, synthetic construct
  source 1..20: mol_type = other RNA
  modified_base 1: mod_base = OTHER; note = 2'-O-methyl-guanosine with phosphorothioate linkage
  modified_base 2: mod_base = OTHER; note = 2'-O-methyl-guanosine with phosphorothioate linkage
  modified_base 3: mod_base = OTHER; note = 2'-O-methyl-uridine
  modified_base 4: mod_base = OTHER; note = 2'-O-methyl-uridine
  modified_base 5: mod_base = OTHER; note = 2'-O-methyl-uridine
  modified_base 6: mod_base = OTHER; note = 2'-fluoro-cytidine
  modified_base 7: mod_base = OTHER; note = 2'-O-methyl-guanosine
  modified_base 8: mod_base = OTHER; note = 2'-fluoro-uridine
  modified_base 9: mod_base = OTHER; note = 2'-fluoro-guanosine
  modified_base 10: mod_base = OTHER; note = 2'-fluoro-adenosine
  modified_base 11: mod_base = OTHER; note = 2'-fluoro-guanosine
  modified_base 12: mod_base = OTHER; note = 2'-O-methyl-guanosine
  modified_base 13: mod_base = OTHER; note = 2'-O-methyl-cytidine
  modified_base 14: mod_base = OTHER; note = 2'-O-methyl-adenosine
  modified_base 15: mod_base = OTHER; note = 2'-O-methyl-guanosine
  modified_base 16: mod_base = OTHER; note = 2'-O-methyl-adenosine
  modified_base 17: mod_base = OTHER; note = 2'-O-methyl-adenosine
  modified_base 18: mod_base = OTHER; note = 2'-O-methyl-adenosine with phosphorothioate linkage
  modified_base 19: mod_base = OTHER; note = 2'-O-methyl-uridine with phosphorothioate linkage
  modified_base 20: mod_base = OTHER; note = 2'-O-methyl-adenosine conjugated to 3 iterations of (2R,3R,4R,5S)-5-(3-(5-(((2R,3R,4R,5R,6R)- 3-acetamido-4,5-dihydroxy-6-(hydroxymethyl)tetrahydro-2H-py ran-2-yl)oxy)pentanamido)propyl)-2-((hydroxyl)methyl)-4-met hoxytetrahydrofuran-3-oxyl
ggtttcgtgaggcagaaata

SEQ ID NO: 880 - RNA, 20 nt, synthetic construct
  source 1..20: mol_type = other RNA
  modified_base 1: mod_base = OTHER; note = 2'-O-methyl-guanosine with phosphorothioate linkage
  modified_base 2: mod_base = OTHER; note = 2'-O-methyl-uridine with phosphorothioate linkage
  modified_base 3: mod_base = OTHER; note = 2'-O-methyl-uridine
  modified_base 4: mod_base = OTHER; note = 2'-O-methyl-uridine
  modified_base 5: mod_base = OTHER; note = 2'-O-methyl-cytidine
  modified_base 6: mod_base = OTHER; note = 2'-fluoro-guanosine
  modified_base 7: mod_base = OTHER; note = 2'-O-methyl-uridine
  modified_base 8: mod_base = OTHER; note = 2'-fluoro-guanosine
  modified_base 9: mod_base = OTHER; note = 2'-fluoro-adenosine
  modified_base 10: mod_base = OTHER; note = 2'-fluoro-guanosine
  modified_base 11: mod_base = OTHER; note = 2'-fluoro-guanosine
  modified_base 12: mod_base = OTHER; note = 2'-O-methyl-cytidine
  modified_base 13: mod_base = OTHER; note = 2'-O-methyl-adenosine
  modified_base 14: mod_base = OTHER; note = 2'-O-methyl-guanosine
  modified_base 15: mod_base = OTHER; note = 2'-O-methyl-adenosine
  modified_base 16: mod_base = OTHER; note = 2'-O-methyl-adenosine
  modified_base 17: mod_base = OTHER; note = 2'-O-methyl-adenosine
  modified_base 18: mod_base = OTHER; note = 2'-O-methyl-uridine with phosphorothioate linkage
  modified_base 19: mod_base = OTHER; note = 2'-O-methyl-uridine with phosphorothioate linkage
  modified_base 20: mod_base = OTHER; note = 2'-O-methyl-adenosine conjugated to 3 iterations of (2R,3R,4R,5S)-5-(3-(5-(((2R,3R,4R,5R,6R)- 3-acetamido-4,5-dihydroxy-6-(hydroxymethyl)tetrahydro-2H-py ran-2-yl)oxy)pentanamido)propyl)-2-((hydroxyl)methyl)-4-met hoxytetrahydrofuran-3-oxyl
gtttcgtgaggcagaaatta

SEQ ID NO: 881 - RNA, 20 nt, synthetic construct
  source 1..20: mol_type = other RNA
  modified_base 1: mod_base = OTHER; note = 2'-O-methyl-guanosine with phosphorothioate linkage
  modified_base 2: mod_base = OTHER; note = 2'-O-methyl-guanosine with phosphorothioate linkage
  modified_base 3: mod_base = OTHER; note = 2'-O-methyl-uridine
  modified_base 4: mod_base = OTHER; note = 2'-O-methyl-cytidine
  modified_base 5: mod_base = OTHER; note = 2'-O-methyl-adenosine
  modified_base 6: mod_base = OTHER; note = 2'-fluoro-uridine
  modified_base 7: mod_base = OTHER; note = 2'-O-methyl-guanosine
  modified_base 8: mod_base = OTHER; note = 2'-fluoro-cytidine
  modified_base 9: mod_base = OTHER; note = 2'-fluoro-uridine
  modified_base 10: mod_base = OTHER; note = 2'-fluoro-guanosine
  modified_base 11: mod_base = OTHER; note = 2'-fluoro-cytidine
  modified_base 12: mod_base = OTHER; note = 2'-O-methyl-guanosine
  modified_base 13: mod_base = OTHER; note = 2'-O-methyl-adenosine
  modified_base 14: mod_base = OTHER; note = 2'-O-methyl-cytidine
  modified_base 15: mod_base = OTHER; note = 2'-O-methyl-adenosine
  modified_base 16: mod_base = OTHER; note = 2'-O-methyl-uridine
  modified_base 17: mod_base = OTHER; note = 2'-O-methyl-guanosine
  modified_base 18: mod_base = OTHER; note = 2'-O-methyl-adenosine with phosphorothioate linkage
  modified_base 19: mod_base = OTHER; note = 2'-O-methyl-adenosine with phosphorothioate linkage
  modified_base 20: mod_base = OTHER; note = 2'-O-methyl-adenosine conjugated to 3 iterations of (2R,3R,4R,5S)-5-(3-(5-(((2R,3R,4R,5R,6R)- 3-acetamido-4,5-dihydroxy-6-(hydroxymethyl)tetrahydro-2H-py ran-2-yl)oxy)pentanamido)propyl)-2-((hydroxyl)methyl)-4-met hoxytetrahydrofuran-3-oxyl
ggtcatgctgcgacatgaaa

SEQ ID NO: 882 - RNA, 20 nt, synthetic construct
  source 1..20: mol_type = other RNA
  modified_base 1: mod_base = OTHER; note = 2'-O-methyl-cytidine with phosphorothioate linkage
  modified_base 2: mod_base = OTHER; note = 2'-O-methyl-adenosine with phosphorothioate linkage
  modified_base 3: mod_base = OTHER; note = 2'-O-methyl-uridine
  modified_base 4: mod_base = OTHER; note = 2'-O-methyl-uridine
  modified_base 5: mod_base = OTHER; note = 2'-O-methyl-guanosine
  modified_base 6: mod_base = OTHER; note = 2'-fluoro-cytidine
  modified_base 7: mod_base = OTHER; note = 2'-O-methyl-uridine
  modified_base 8: mod_base = OTHER; note = 2'-fluoro-guanosine
  modified_base 9: mod_base = OTHER; note = 2'-fluoro-cytidine
  modified_base 10: mod_base = OTHER; note = 2'-fluoro-uridine
  modified_base 11: mod_base = OTHER; note = 2'-fluoro-guanosine
  modified_base 12: mod_base = OTHER; note = 2'-O-methyl-adenosine
  modified_base 13: mod_base = OTHER; note = 2'-O-methyl-cytidine
  modified_base 14: mod_base = OTHER; note = 2'-O-methyl-adenosine
  modified_base 15: mod_base = OTHER; note = 2'-O-methyl-adenosine
  modified_base 16: mod_base = OTHER; note = 2'-O-methyl-cytidine
  modified_base 17: mod_base = OTHER; note = 2'-O-methyl-adenosine
  modified_base 18: mod_base = OTHER; note = 2'-O-methyl-adenosine with phosphorothioate linkage
  modified_base 19: mod_base = OTHER; note = 2'-O-methyl-adenosine with phosphorothioate linkage
  modified_base 20: mod_base = OTHER; note = 2'-O-methyl-adenosine conjugated to 3 iterations of (2R,3R,4R,5S)-5-(3-(5-(((2R,3R,4R,5R,6R)- 3-acetamido-4,5-dihydroxy-6-(hydroxymethyl)tetrahydro-2H-py ran-2-yl)oxy)pentanamido)propyl)-2-((hydroxyl)methyl)-4-met hoxytetrahydrofuran-3-oxyl
cattgctgctgacaacaaaa

SEQ ID NO: 883 - RNA, 20 nt, synthetic construct
  source 1..20: mol_type = other RNA
  modified_base 1: mod_base = OTHER; note = 2'-O-methyl-cytidine with phosphorothioate linkage
  modified_base 2: mod_base = OTHER; note = 2'-O-methyl-adenosine with phosphorothioate linkage
  modified_base 3: mod_base = OTHER; note = 2'-O-methyl-guanosine
  modified_base 4: mod_base = OTHER; note = 2'-O-methyl-guanosine
  modified_base 5: mod_base = OTHER; note = 2'-O-methyl-guanosine
  modified_base 6: mod_base = OTHER; note = 2'-fluoro-cytidine
  modified_base 7: mod_base = OTHER; note = 2'-O-methyl-uridine
  modified_base 8: mod_base = OTHER; note = 2'-fluoro-cytidine
  modified_base 9: mod_base = OTHER; note = 2'-fluoro-cytidine
  modified_base 10: mod_base = OTHER; note = 2'-fluoro-uridine
  modified_base 11: mod_base = OTHER; note = 2'-fluoro-uridine
  modified_base 12: mod_base = OTHER; note = 2'-O-methyl-adenosine
  modified_base 13: mod_base = OTHER; note = 2'-O-methyl-uridine
  modified_base 14: mod_base = OTHER; note = 2'-O-methyl-adenosine
  modified_base 15: mod_base = OTHER; note = 2'-O-methyl-uridine
  modified_base 16: mod_base = OTHER; note = 2'-O-methyl-guanosine
  modified_base 17: mod_base = OTHER; note = 2'-O-methyl-adenosine
  modified_base 18: mod_base = OTHER; note = 2'-O-methyl-cytidine with phosphorothioate linkage
  modified_base 19: mod_base = OTHER; note = 2'-O-methyl-uridine with phosphorothioate linkage
  modified_base 20: mod_base = OTHER; note = 2'-O-methyl-adenosine conjugated to 3 iterations of (2R,3R,4R,5S)-5-(3-(5-(((2R,3R,4R,5R,6R)- 3-acetamido-4,5-dihydroxy-6-(hydroxymethyl)tetrahydro-2H-py ran-2-yl)oxy)pentanamido)propyl)-2-((hydroxyl)methyl)-4-met hoxytetrahydrofuran-3-oxyl
cagggctccttatatgacta

SEQ ID NO: 884 - RNA, 20 nt, synthetic construct
  source 1..20: mol_type = other RNA
  modified_base 1: mod_base = OTHER; note = 2'-O-methyl-guanosine with phosphorothioate linkage
  modified_base 2: mod_base = OTHER; note = 2'-O-methyl-guanosine with phosphorothioate linkage
  modified_base 3: mod_base = OTHER; note = 2'-O-methyl-uridine
  modified_base 4: mod_base = OTHER; note = 2'-O-methyl-cytidine
  modified_base 5: mod_base = OTHER; note = 2'-O-methyl-uridine
  modified_base 6: mod_base = OTHER; note = 2'-fluoro-guanosine
  modified_base 7: mod_base = OTHER; note = 2'-O-methyl-guanosine
  modified_base 8: mod_base = OTHER; note = 2'-fluoro-cytidine
  modified_base 9: mod_base = OTHER; note = 2'-fluoro-adenosine
  modified_base 10: mod_base = OTHER; note = 2'-fluoro-cytidine
  modified_base 11: mod_base = OTHER; note = 2'-fluoro-adenosine
  modified_base 12: mod_base = OTHER; note = 2'-O-methyl-cytidine
  modified_base 13: mod_base = OTHER; note = 2'-O-methyl-cytidine
  modified_base 14: mod_base = OTHER; note = 2'-O-methyl-uridine
  modified_base 15: mod_base = OTHER; note = 2'-O-methyl-uridine
  modified_base 16: mod_base = OTHER; note = 2'-O-methyl-cytidine
  modified_base 17: mod_base = OTHER; note = 2'-O-methyl-adenosine
  modified_base 18: mod_base = OTHER; note = 2'-O-methyl-uridine with phosphorothioate linkage
  modified_base 19: mod_base = OTHER; note = 2'-O-methyl-adenosine with phosphorothioate linkage
  modified_base 20: mod_base = OTHER; note = 2'-O-methyl-adenosine conjugated to 3 iterations of (2R,3R,4R,5S)-5-(3-(5-(((2R,3R,4R,5R,6R)- 3-acetamido-4,5-dihydroxy-6-(hydroxymethyl)tetrahydro-2H-py ran-2-yl)oxy)pentanamido)propyl)-2-((hydroxyl)methyl)-4-met hoxytetrahydrofuran-3-oxyl
ggtctggcacaccttcataa

SEQ ID NO: 885 - RNA, 20 nt, synthetic construct
  source 1..20: mol_type = other RNA
  modified_base 1: mod_base = OTHER; note = 2'-O-methyl-guanosine with phosphorothioate linkage
  modified_base 2: mod_base = OTHER; note = 2'-O-methyl-uridine with phosphorothioate linkage
  modified_base 3: mod_base = OTHER; note = 2'-O-methyl-cytidine
  modified_base 4: mod_base = OTHER; note = 2'-O-methyl-uridine
  modified_base 5: mod_base = OTHER; note = 2'-O-methyl-guanosine
  modified_base 6: mod_base = OTHER; note = 2'-fluoro-guanosine
  modified_base 7: mod_base = OTHER; note = 2'-O-methyl-cytidine
  modified_base 8: mod_base = OTHER; note = 2'-fluoro-adenosine
  modified_base 9: mod_base = OTHER; note = 2'-fluoro-cytidine
  modified_base 10: mod_base = OTHER; note = 2'-fluoro-adenosine
  modified_base 11: mod_base = OTHER; note = 2'-fluoro-cytidine
  modified_base 12: mod_base = OTHER; note = 2'-O-methyl-cytidine
  modified_base 13: mod_base = OTHER; note = 2'-O-methyl-uridine
  modified_base 14: mod_base = OTHER; note = 2'-O-methyl-uridine
  modified_base 15: mod_base = OTHER; note = 2'-O-methyl-cytidine
  modified_base 16: mod_base = OTHER; note = 2'-O-methyl-adenosine
  modified_base 17: mod_base = OTHER; note = 2'-O-methyl-uridine
  modified_base 18: mod_base = OTHER; note = 2'-O-methyl-adenosine with phosphorothioate linkage
  modified_base 19: mod_base = OTHER; note = 2'-O-methyl-uridine with phosphorothioate linkage
  modified_base 20: mod_base = OTHER; note = 2'-O-methyl-adenosine conjugated to 3 iterations of (2R,3R,4R,5S)-5-(3-(5-(((2R,3R,4R,5R,6R)- 3-acetamido-4,5-dihydroxy-6-(hydroxymethyl)tetrahydro-2H-py ran-2-yl)oxy)pentanamido)propyl)-2-((hydroxyl)methyl)-4-met hoxytetrahydrofuran-3-oxyl
gtctggcacaccttcatata

SEQ ID NO: 886 - RNA, 20 nt, synthetic construct
  source 1..20: mol_type = other RNA
  modified_base 1: mod_base = OTHER; note = 2'-O-methyl-cytidine with phosphorothioate linkage
  modified_base 2: mod_base = OTHER; note = 2'-O-methyl-adenosine with phosphorothioate linkage
  modified_base 3: mod_base = OTHER; note = 2'-O-methyl-uridine
  modified_base 4: mod_base = OTHER; note = 2'-O-methyl-cytidine
  modified_base 5: mod_base = OTHER; note = 2'-O-methyl-guanosine
  modified_base 6: mod_base = OTHER; note = 2'-fluoro-adenosine
  modified_base 7: mod_base = OTHER; note = 2'-O-methyl-guanosine
  modified_base 8: mod_base = OTHER; note = 2'-fluoro-adenosine
  modified_base 9: mod_base = OTHER; note = 2'-fluoro-cytidine
  modified_base 10: mod_base = OTHER; note = 2'-fluoro-adenosine
  modified_base 11: mod_base = OTHER; note = 2'-fluoro-uridine
  modified_base 12: mod_base = OTHER; note = 2'-O-methyl-adenosine
  modified_base 13: mod_base = OTHER; note = 2'-O-methyl-adenosine
  modified_base 14: mod_base = OTHER; note = 2'-O-methyl-adenosine
  modified_base 15: mod_base = OTHER; note = 2'-O-methyl-adenosine
  modified_base 16: mod_base = OTHER; note = 2'-O-methyl-uridine
  modified_base 17: mod_base = OTHER; note = 2'-O-methyl-cytidine
  modified_base 18: mod_base = OTHER; note = 2'-O-methyl-adenosine with phosphorothioate linkage
  modified_base 19: mod_base = OTHER; note = 2'-O-methyl-adenosine with phosphorothioate linkage
  modified_base 20: mod_base = OTHER; note = 2'-O-methyl-adenosine conjugated to 3 iterations of (2R,3R,4R,5S)-5-(3-(5-(((2R,3R,4R,5R,6R)- 3-acetamido-4,5-dihydroxy-6-(hydroxymethyl)tetrahydro-2H-py ran-2-yl)oxy)pentanamido)propyl)-2-((hydroxyl)methyl)-4-met hoxytetrahydrofuran-3-oxyl
catcgagacataaaatcaaa

SEQ ID NO: 887 - RNA, 20 nt, synthetic construct
  source 1..20: mol_type = other RNA
  modified_base 1: mod_base = OTHER; note = 2'-O-methyl-cytidine with phosphorothioate linkage
  modified_base 2: mod_base = OTHER; note = 2'-O-methyl-guanosine with phosphorothioate linkage
  modified_base 3: mod_base = OTHER; note = 2'-O-methyl-adenosine
  modified_base 4: mod_base = OTHER; note = 2'-O-methyl-guanosine
  modified_base 5: mod_base = OTHER; note = 2'-O-methyl-adenosine
  modified_base 6: mod_base = OTHER; note = 2'-fluoro-cytidine
  modified_base 7: mod_base = OTHER; note = 2'-O-methyl-adenosine
  modified_base 8: mod_base = OTHER; note = 2'-fluoro-uridine
  modified_base 9: mod_base = OTHER; note = 2'-fluoro-adenosine
  modified_base 10: mod_base = OTHER; note = 2'-fluoro-adenosine
  modified_base 11: mod_base = OTHER; note = 2'-fluoro-adenosine
  modified_base 12: mod_base = OTHER; note = 2'-O-methyl-adenosine
  modified_base 13: mod_base = OTHER; note = 2'-O-methyl-uridine
  modified_base 14: mod_base = OTHER; note = 2'-O-methyl-cytidine
  modified_base 15: mod_base = OTHER; note = 2'-O-methyl-adenosine
  modified_base 16: mod_base = OTHER; note = 2'-O-methyl-adenosine
  modified_base 17: mod_base = OTHER; note = 2'-O-methyl-adenosine
  modified_base 18: mod_base = OTHER; note = 2'-O-methyl-guanosine with phosphorothioate linkage
  modified_base 19: mod_base = OTHER; note = 2'-O-methyl-adenosine with phosphorothioate linkage
  modified_base 20: mod_base = OTHER; note = 2'-O-methyl-adenosine conjugated to 3 iterations of (2R,3R,4R,5S)-5-(3-(5-(((2R,3R,4R,5R,6R)- 3-acetamido-4,5-dihydroxy-6-(hydroxymethyl)tetrahydro-2H-py ran-2-yl)oxy)pentanamido)propyl)-2-((hydroxyl)methyl)-4-met hoxytetrahydrofuran-3-oxyl
cgagacataaaatcaaagaa

SEQ ID NO: 888 - RNA, 20 nt, synthetic construct
  source 1..20: mol_type = other RNA
  modified_base 1: mod_base = OTHER; note = 2'-O-methyl-guanosine with phosphorothioate linkage
  modified_base 2: mod_base = OTHER; note = 2'-O-methyl-adenosine with phosphorothioate linkage
  modified_base 3: mod_base = OTHER; note = 2'-O-methyl-uridine
  modified_base 4: mod_base = OTHER; note = 2'-O-methyl-uridine
  modified_base 5: mod_base = OTHER; note = 2'-O-methyl-cytidine
  modified_base 6: mod_base = OTHER; note = 2'-fluoro-adenosine
  modified_base 7: mod_base = OTHER; note = 2'-O-methyl-adenosine
  modified_base 8: mod_base = OTHER; note = 2'-fluoro-uridine
  modified_base 9: mod_base = OTHER; note = 2'-fluoro-adenosine
  modified_base 10: mod_base = OTHER; note = 2'-fluoro-cytidine
  modified_base 11: mod_base = OTHER; note = 2'-fluoro-uridine
  modified_base 12: mod_base = OTHER; note = 2'-O-methyl-guanosine
  modified_base 13: mod_base = OTHER; note = 2'-O-methyl-adenosine
  modified_base 14: mod_base = OTHER; note = 2'-O-methyl-adenosine
  modified_base 15: mod_base = OTHER; note = 2'-O-methyl-cytidine
  modified_base 16: mod_base = OTHER; note = 2'-O-methyl-adenosine
  modified_base 17: mod_base = OTHER; note = 2'-O-methyl-cytidine
  modified_base 18: mod_base = OTHER; note = 2'-O-methyl-uridine with phosphorothioate linkage
  modified_base 19: mod_base = OTHER; note = 2'-O-methyl-adenosine with phosphorothioate linkage
  modified_base 20: mod_base = OTHER; note = 2'-O-methyl-adenosine conjugated to 3 iterations of (2R,3R,4R,5S)-5-(3-(5-(((2R,3R,4R,5R,6R)- 3-acetamido-4,5-dihydroxy-6-(hydroxymethyl)tetrahydro-2H-py ran-2-yl)oxy)pentanamido)propyl)-2-((hydroxyl)methyl)-4-met hoxytetrahydrofuran-3-oxyl
gattcaatactgaacactaa

SEQ ID NO: 889 - RNA, 20 nt, synthetic construct
  source 1..20: mol_type = other RNA
  modified_base 1: mod_base = OTHER; note = 2'-O-methyl-guanosine with phosphorothioate linkage
  modified_base 2: mod_base = OTHER; note = 2'-O-methyl-adenosine with phosphorothioate linkage
  modified_base 3: mod_base = OTHER; note = 2'-O-methyl-cytidine
  modified_base 4: mod_base = OTHER; note = 2'-O-methyl-adenosine
  modified_base 5: mod_base = OTHER; note = 2'-O-methyl-uridine
  modified_base 6: mod_base = OTHER; note = 2'-fluoro-adenosine
  modified_base 7: mod_base = OTHER; note = 2'-O-methyl-cytidine
  modified_base 8: mod_base = OTHER; note = 2'-fluoro-cytidine
  modified_base 9: mod_base = OTHER; note = 2'-fluoro-uridine
  modified_base 10: mod_base = OTHER; note = 2'-fluoro-cytidine
  modified_base 11: mod_base = OTHER; note = 2'-fluoro-adenosine
  modified_base 12: mod_base = OTHER; note = 2'-O-methyl-guanosine
  modified_base 13: mod_base = OTHER; note = 2'-O-methyl-adenosine
  modified_base 14: mod_base = OTHER; note = 2'-O-methyl-adenosine
  modified_base 15: mod_base = OTHER; note = 2'-O-methyl-uridine
  modified_base 16: mod_base = OTHER; note = 2'-O-methyl-cytidine
  modified_base 17: mod_base = OTHER; note = 2'-O-methyl-cytidine
  modified_base 18: mod_base = OTHER; note = 2'-O-methyl-uridine with phosphorothioate linkage
  modified_base 19: mod_base = OTHER; note = 2'-O-methyl-adenosine with phosphorothioate linkage
  modified_base 20: mod_base = OTHER; note = 2'-O-methyl-adenosine conjugated to 3 iterations of (2R,3R,4R,5S)-5-(3-(5-(((2R,3R,4R,5R,6R)- 3-acetamido-4,5-dihydroxy-6-(hydroxymethyl)tetrahydro-2H-py ran-2-yl)oxy)pentanamido)propyl)-2-((hydroxyl)methyl)-4-met hoxytetrahydrofuran-3-oxyl
gacatacctcagaatcctaa

SEQ ID NO: 890 - RNA, 20 nt, synthetic construct
  source 1..20: mol_type = other RNA
  modified_base 1: mod_base = OTHER; note = 2'-O-methyl-guanosine with phosphorothioate linkage
  modified_base 2: mod_base = OTHER; note = 2'-O-methyl-guanosine with phosphorothioate linkage
  modified_base 3: mod_base = OTHER; note = 2'-O-methyl-uridine
  modified_base 4: mod_base = OTHER; note = 2'-O-methyl-adenosine
  modified_base 5: mod_base = OTHER; note = 2'-O-methyl-uridine
  modified_base 6: mod_base = OTHER; note = 2'-fluoro-adenosine
  modified_base 7: mod_base = OTHER; note = 2'-O-methyl-uridine
  modified_base 8: mod_base = OTHER; note = 2'-fluoro-guanosine
  modified_base 9: mod_base = OTHER; note = 2'-fluoro-guanosine
  modified_base 10: mod_base = OTHER; note = 2'-fluoro-cytidine
  modified_base 11: mod_base = OTHER; note = 2'-fluoro-uridine
  modified_base 12: mod_base = OTHER; note = 2'-O-methyl-cytidine
  modified_base 13: mod_base = OTHER; note = 2'-O-methyl-cytidine
  modified_base 14: mod_base = OTHER; note = 2'-O-methyl-uridine
  modified_base 15: mod_base = OTHER; note = 2'-O-methyl-guanosine
  modified_base 16: mod_base = OTHER; note = 2'-O-methyl-adenosine
  modified_base 17: mod_base = OTHER; note = 2'-O-methyl-adenosine
  modified_base 18: mod_base = OTHER; note = 2'-O-methyl-adenosine with phosphorothioate linkage
  modified_base 19: mod_base = OTHER; note = 2'-O-methyl-uridine with phosphorothioate linkage
  modified_base 20: mod_base = OTHER; note = 2'-O-methyl-adenosine conjugated to 3 iterations of (2R,3R,4R,5S)-5-(3-(5-(((2R,3R,4R,5R,6R)- 3-acetamido-4,5-dihydroxy-6-(hydroxymethyl)tetrahydro-2H-py ran-2-yl)oxy)pentanamido)propyl)-2-((hydroxyl)methyl)-4-met hoxytetrahydrofuran-3-oxyl
ggtatatggctcctgaaata

SEQ ID NO: 891 - RNA, 20 nt, synthetic construct
  source 1..20: mol_type = other RNA
  modified_base 1: mod_base = OTHER; note = 2'-O-methyl-cytidine with phosphorothioate linkage
  modified_base 2: mod_base = OTHER; note = 2'-O-methyl-uridine with phosphorothioate linkage
  modified_base 3: mod_base = OTHER; note = 2'-O-methyl-uridine
  modified_base 4: mod_base = OTHER; note = 2'-O-methyl-uridine
  modified_base 5: mod_base = OTHER; note = 2'-O-methyl-guanosine
  modified_base 6: mod_base = OTHER; note = 2'-fluoro-adenosine
  modified_base 7: mod_base = OTHER; note = 2'-O-methyl-guanosine
  modified_base 8: mod_base = OTHER; note = 2'-fluoro-uridine
  modified_base 9: mod_base = OTHER; note = 2'-fluoro-cytidine
  modified_base 10: mod_base = OTHER; note = 2'-fluoro-cytidine
  modified_base 11: mod_base = OTHER; note = 2'-fluoro-uridine
  modified_base 12: mod_base = OTHER; note = 2'-O-methyl-uridine
  modified_base 13: mod_base = OTHER; note = 2'-O-methyl-cytidine
  modified_base 14: mod_base = OTHER; note = 2'-O-methyl-adenosine
  modified_base 15: mod_base = OTHER; note = 2'-O-methyl-adenosine
  modified_base 16: mod_base = OTHER; note = 2'-O-methyl-adenosine
  modified_base 17: mod_base = OTHER; note = 2'-O-methyl-cytidine
  modified_base 18: mod_base = OTHER; note = 2'-O-methyl-guanosine with phosphorothioate linkage
  modified_base 19: mod_base = OTHER; note = 2'-O-methyl-adenosine with phosphorothioate linkage
  modified_base 20: mod_base = OTHER; note = 2'-O-methyl-adenosine conjugated to 3 iterations of (2R,3R,4R,5S)-5-(3-(5-(((2R,3R,4R,5R,6R)- 3-acetamido-4,5-dihydroxy-6-(hydroxymethyl)tetrahydro-2H-py ran-2-yl)oxy)pentanamido)propyl)-2-((hydroxyl)methyl)-4-met hoxytetrahydrofuran-3-oxyl
ctttgagtccttcaaacgaa

SEQ ID NO: 892 - RNA, 20 nt, synthetic construct
  source 1..20: mol_type = other RNA
  modified_base 1: mod_base = OTHER; note = 2'-O-methyl-cytidine with phosphorothioate linkage
  modified_base 2: mod_base = OTHER; note = 2'-O-methyl-cytidine with phosphorothioate linkage
  modified_base 3: mod_base = OTHER; note = 2'-O-methyl-adenosine
  modified_base 4: mod_base = OTHER; note = 2'-O-methyl-adenosine
  modified_base 5: mod_base = OTHER; note = 2'-O-methyl-adenosine
  modified_base 6: mod_base = OTHER; note = 2'-fluoro-cytidine
  modified_base 7: mod_base = OTHER; note = 2'-O-methyl-cytidine
  modified_base 8: mod_base = OTHER; note = 2'-fluoro-adenosine
  modified_base 9: mod_base = OTHER; note = 2'-fluoro-guanosine
  modified_base 10: mod_base = OTHER; note = 2'-fluoro-uridine
  modified_base 11: mod_base = OTHER; note = 2'-fluoro-guanosine
  modified_base 12: mod_base = OTHER; note = 2'-O-methyl-guanosine
  modified_base 13: mod_base = OTHER; note = 2'-O-methyl-cytidine
  modified_base 14: mod_base = OTHER; note = 2'-O-methyl-adenosine
  modified_base 15: mod_base = OTHER; note = 2'-O-methyl-adenosine
  modified_base 16: mod_base = OTHER; note = 2'-O-methyl-adenosine
  modified_base 17: mod_base = OTHER; note = 2'-O-methyl-guanosine
  modified_base 18: mod_base = OTHER; note = 2'-O-methyl-uridine with phosphorothioate linkage
  modified_base 19: mod_base = OTHER; note = 2'-O-methyl-uridine with phosphorothioate linkage
  modified_base 20: mod_base = OTHER; note = 2'-O-methyl-adenosine conjugated to 3 iterations of (2R,3R,4R,5S)-5-(3-(5-(((2R,3R,4R,5R,6R)- 3-acetamido-4,5-dihydroxy-6-(hydroxymethyl)tetrahydro-2H-py ran-2-yl)oxy)pentanamido)propyl)-2-((hydroxyl)methyl)-4-met hoxytetrahydrofuran-3-oxyl
ccaaaccagtggcaaagtta

SEQ ID NO: 893 - RNA, 20 nt, synthetic construct
  source 1..20: mol_type = other RNA
  modified_base 1: mod_base = OTHER; note = 2'-O-methyl-cytidine with phosphorothioate linkage
  modified_base 2: mod_base = OTHER; note = 2'-O-methyl-cytidine with phosphorothioate linkage
  modified_base 3: mod_base = OTHER; note = 2'-O-methyl-adenosine
  modified_base 4: mod_base = OTHER; note = 2'-O-methyl-guanosine
  modified_base 5: mod_base = OTHER; note = 2'-O-methyl-uridine
  modified_base 6: mod_base = OTHER; note = 2'-fluoro-guanosine
  modified_base 7: mod_base = OTHER; note = 2'-O-methyl-guanosine
  modified_base 8: mod_base = OTHER; note = 2'-fluoro-cytidine
  modified_base 9: mod_base = OTHER; note = 2'-fluoro-adenosine
  modified_base 10: mod_base = OTHER; note = 2'-fluoro-adenosine
  modified_base 11: mod_base = OTHER; note = 2'-fluoro-adenosine
  modified_base 12: mod_base = OTHER; note = 2'-O-methyl-guanosine
  modified_base 13: mod_base = OTHER; note = 2'-O-methyl-uridine
  modified_base 14: mod_base = OTHER; note = 2'-O-methyl-uridine
  modified_base 15: mod_base = OTHER; note = 2'-O-methyl-guanosine
  modified_base 16: mod_base = OTHER; note = 2'-O-methyl-uridine
  modified_base 17: mod_base = OTHER; note = 2'-O-methyl-guanosine
  modified_base 18: mod_base = OTHER; note = 2'-O-methyl-adenosine with phosphorothioate linkage
  modified_base 19: mod_base = OTHER; note = 2'-O-methyl-adenosine with phosphorothioate linkage
  modified_base 20: mod_base = OTHER; note = 2'-O-methyl-adenosine conjugated to 3 iterations of (2R,3R,4R,5S)-5-(3-(5-(((2R,3R,4R,5R,6R)- 3-acetamido-4,5-dihydroxy-6-(hydroxymethyl)tetrahydro-2H-py ran-2-yl)oxy)pentanamido)propyl)-2-((hydroxyl)methyl)-4-met hoxytetrahydrofuran-3-oxyl
ccagtggcaaagttgtgaaa

SEQ ID NO: 894 - RNA, 20 nt, synthetic construct
  source 1..20: mol_type = other RNA
  modified_base 1: mod_base = OTHER; note = 2'-O-methyl-cytidine with phosphorothioate linkage
  modified_base 2: mod_base = OTHER; note = 2'-O-methyl-guanosine with phosphorothioate linkage
  modified_base 3: mod_base = OTHER; note = 2'-O-methyl-cytidine
  modified_base 4: mod_base = OTHER; note = 2'-O-methyl-cytidine
  modified_base 5: mod_base = OTHER; note = 2'-O-methyl-uridine
  modified_base 6: mod_base = OTHER; note = 2'-fluoro-adenosine
  modified_base 7: mod_base = OTHER; note = 2'-O-methyl-adenosine
  modified_base 8: mod_base = OTHER; note = 2'-fluoro-cytidine
  modified_base 9: mod_base = OTHER; note = 2'-fluoro-uridine
  modified_base 10: mod_base = OTHER; note = 2'-fluoro-guanosine
  modified_base 11: mod_base = OTHER; note = 2'-fluoro-cytidine
  modified_base 12: mod_base = OTHER; note = 2'-O-methyl-uridine
  modified_base 13: mod_base = OTHER; note = 2'-O-methyl-cytidine
  modified_base 14: mod_base = OTHER; note = 2'-O-methyl-uridine
  modified_base 15: mod_base = OTHER; note = 2'-O-methyl-uridine
  modified_base 16: mod_base = OTHER; note = 2'-O-methyl-cytidine
  modified_base 17: mod_base = OTHER; note = 2'-O-methyl-guanosine
  modified_base 18: mod_base = OTHER; note = 2'-O-methyl-uridine with phosphorothioate linkage
  modified_base 19: mod_base = OTHER; note = 2'-O-methyl-adenosine with phosphorothioate linkage
  modified_base 20: mod_base = OTHER; note = 2'-O-methyl-adenosine conjugated to 3 iterations of (2R,3R,4R,5S)-5-(3-(5-(((2R,3R,4R,5R,6R)- 3-acetamido-4,5-dihydroxy-6-(hydroxymethyl)tetrahydro-2H-py ran-2-yl)oxy)pentanamido)propyl)-2-((hydroxyl)methyl)-4-met hoxytetrahydrofuran-3-oxyl
cgcctaactgctcttcgtaa

SEQ ID NO: 895 - RNA, 20 nt, synthetic construct
  source 1..20: mol_type = other RNA
  modified_base 1: mod_base = OTHER; note = 2'-O-methyl-cytidine with phosphorothioate linkage
  modified_base 2: mod_base = OTHER; note = 2'-O-methyl-uridine with phosphorothioate linkage
  modified_base 3: mod_base = OTHER; note = 2'-O-methyl-uridine
  modified_base 4: mod_base = OTHER; note = 2'-O-methyl-cytidine
  modified_base 5: mod_base = OTHER; note = 2'-O-methyl-guanosine
  modified_base 6: mod_base = OTHER; note = 2'-fluoro-uridine
  modified_base 7: mod_base = OTHER; note = 2'-O-methyl-adenosine
  modified_base 8: mod_base = OTHER; note = 2'-fluoro-uridine
  modified_base 9: mod_base = OTHER; note = 2'-fluoro-uridine
  modified_base 10: mod_base = OTHER; note = 2'-fluoro-adenosine
  modified_base 11: mod_base = OTHER; note = 2'-fluoro-adenosine
  modified_base 12: mod_base = OTHER; note = 2'-O-methyl-guanosine
  modified_base 13: mod_base = OTHER; note = 2'-O-methyl-adenosine
  modified_base 14: mod_base = OTHER; note = 2'-O-methyl-adenosine
  modified_base 15: mod_base = OTHER; note = 2'-O-methyl-guanosine
  modified_base 16: mod_base = OTHER; note = 2'-O-methyl-adenosine
  modified_base 17: mod_base = OTHER; note = 2'-O-methyl-cytidine
  modified_base 18: mod_base = OTHER; note = 2'-O-methyl-uridine with phosphorothioate linkage
  modified_base 19: mod_base = OTHER; note = 2'-O-methyl-adenosine with phosphorothioate linkage
  modified_base 20: mod_base = OTHER; note = 2'-O-methyl-adenosine conjugated to 3 iterations of (2R,3R,4R,5S)-5-(3-(5-(((2R,3R,4R,5R,6R)- 3-acetamido-4,5-dihydroxy-6-(hydroxymethyl)tetrahydro-2H-py ran-2-yl)oxy)pentanamido)propyl)-2-((hydroxyl)methyl)-4-met hoxytetrahydrofuran-3-oxyl
cttcgtattaagaagactaa

SEQ ID NO: 896 - RNA, 20 nt, synthetic construct
  source 1..20: mol_type = other RNA
  modified_base 1: mod_base = OTHER; note = 2'-O-methyl-guanosine with phosphorothioate linkage
  modified_base 2: mod_base = OTHER; note = 2'-O-methyl-adenosine with phosphorothioate linkage
  modified_base 3: mod_base = OTHER; note = 2'-O-methyl-adenosine
  modified_base 4: mod_base = OTHER; note = 2'-O-methyl-guanosine
  modified_base 5: mod_base = OTHER; note = 2'-O-methyl-adenosine
  modified_base 6: mod_base = OTHER; note = 2'-fluoro-cytidine
  modified_base 7: mod_base = OTHER; note = 2'-O-methyl-uridine
  modified_base 8: mod_base = OTHER; note = 2'-fluoro-adenosine
  modified_base 9: mod_base = OTHER; note = 2'-fluoro-uridine
  modified_base 10: mod_base = OTHER; note = 2'-fluoro-adenosine
  modified_base 11: mod_base = OTHER; note = 2'-fluoro-uridine
  modified_base 12: mod_base = OTHER; note = 2'-O-methyl-cytidine
  modified_base 13: mod_base = OTHER; note = 2'-O-methyl-uridine
  modified_base 14: mod_base = OTHER; note = 2'-O-methyl-cytidine
  modified_base 15: mod_base = OTHER; note = 2'-O-methyl-adenosine
  modified_base 16: mod_base = OTHER; note = 2'-O-methyl-adenosine
  modified_base 17: mod_base = OTHER; note = 2'-O-methyl-cytidine
  modified_base 18: mod_base = OTHER; note = 2'-O-methyl-uridine with phosphorothioate linkage
  modified_base 19: mod_base = OTHER; note = 2'-O-methyl-uridine with phosphorothioate linkage
  modified_base 20: mod_base = OTHER; note = 2'-O-methyl-adenosine conjugated to 3 iterations of (2R,3R,4R,5S)-5-(3-(5-(((2R,3R,4R,5R,6R)- 3-acetamido-4,5-dihydroxy-6-(hydroxymethyl)tetrahydro-2H-py ran-2-yl)oxy)pentanamido)propyl)-2-((hydroxyl)methyl)-4-met hoxytetrahydrofuran-3-oxyl
gaagactatatctcaactta

SEQ ID NO: 897 - RNA, 20 nt, synthetic construct
  source 1..20: mol_type = other RNA
  modified_base 1: mod_base = OTHER; note = 2'-O-methyl-guanosine with phosphorothioate linkage
  modified_base 2: mod_base = OTHER; note = 2'-O-methyl-adenosine with phosphorothioate linkage
  modified_base 3: mod_base = OTHER; note = 2'-O-methyl-cytidine
  modified_base 4: mod_base = OTHER; note = 2'-O-methyl-uridine
  modified_base 5: mod_base = OTHER; note = 2'-O-methyl-adenosine
  modified_base 6: mod_base = OTHER; note = 2'-fluoro-uridine
  modified_base 7: mod_base = OTHER; note = 2'-O-methyl-adenosine
  modified_base 8: mod_base = OTHER; note = 2'-fluoro-uridine
  modified_base 9: mod_base = OTHER; note = 2'-fluoro-cytidine
  modified_base 10: mod_base = OTHER; note = 2'-fluoro-uridine
  modified_base 11: mod_base = OTHER; note = 2'-fluoro-cytidine
  modified_base 12: mod_base = OTHER; note = 2'-O-methyl-adenosine
  modified_base 13: mod_base = OTHER; note = 2'-O-methyl-adenosine
  modified_base 14: mod_base = OTHER; note = 2'-O-methyl-cytidine
  modified_base 15: mod_base = OTHER; note = 2'-O-methyl-uridine
  modified_base 16: mod_base = OTHER; note = 2'-O-methyl-uridine
  modified_base 17: mod_base = OTHER; note = 2'-O-methyl-uridine
  modified_base 18: mod_base = OTHER; note = 2'-O-methyl-guanosine with phosphorothioate linkage
  modified_base 19: mod_base = OTHER; note = 2'-O-methyl-uridine with phosphorothioate linkage
  modified_base 20: mod_base = OTHER; note = 2'-O-methyl-adenosine conjugated to 3 iterations of (2R,3R,4R,5S)-5-(3-(5-(((2R,3R,4R,5R,6R)- 3-acetamido-4,5-dihydroxy-6-(hydroxymethyl)tetrahydro-2H-py ran-2-yl)oxy)pentanamido)propyl)-2-((hydroxyl)methyl)-4-met hoxytetrahydrofuran-3-oxyl
gactatatctcaactttgta

SEQ ID NO: 898 - RNA, 20 nt, synthetic construct
  source 1..20: mol_type = other RNA
  modified_base 1: mod_base = OTHER; note = 2'-O-methyl-cytidine with phosphorothioate linkage
  modified_base 2: mod_base = OTHER; note = 2'-O-methyl-uridine with phosphorothioate linkage
  modified_base 3: mod_base = OTHER; note = 2'-O-methyl-adenosine
  modified_base 4: mod_base = OTHER; note = 2'-O-methyl-uridine
  modified_base 5: mod_base = OTHER; note = 2'-O-methyl-adenosine
  modified_base 6: mod_base = OTHER; note = 2'-fluoro-uridine
  modified_base 7: mod_base = OTHER; note = 2'-O-methyl-cytidine
  modified_base 8: mod_base = OTHER; note = 2'-fluoro-uridine
  modified_base 9: mod_base = OTHER; note = 2'-fluoro-cytidine
  modified_base 10: mod_base = OTHER; note = 2'-fluoro-adenosine
  modified_base 11: mod_base = OTHER; note = 2'-fluoro-adenosine
  modified_base 12: mod_base = OTHER; note = 2'-O-methyl-cytidine
  modified_base 13: mod_base = OTHER; note = 2'-O-methyl-uridine
  modified_base 14: mod_base = OTHER; note = 2'-O-methyl-uridine
  modified_base 15: mod_base = OTHER; note = 2'-O-methyl-uridine
  modified_base 16: mod_base = OTHER; note = 2'-O-methyl-guanosine
  modified_base 17: mod_base = OTHER; note = 2'-O-methyl-uridine
  modified_base 18: mod_base = OTHER; note = 2'-O-methyl-guanosine with phosphorothioate linkage
  modified_base 19: mod_base = OTHER; note = 2'-O-methyl-uridine with phosphorothioate linkage
  modified_base 20: mod_base = OTHER; note = 2'-O-methyl-adenosine conjugated to 3 iterations of (2R,3R,4R,5S)-5-(3-(5-(((2R,3R,4R,5R,6R)- 3-acetamido-4,5-dihydroxy-6-(hydroxymethyl)tetrahydro-2H-py ran-2-yl)oxy)pentanamido)propyl)-2-((hydroxyl)methyl)-4-met hoxytetrahydrofuran-3-oxyl
ctatatctcaactttgtgta

SEQ ID NO: 899 - RNA, 20 nt, synthetic construct
  source 1..20: mol_type = other RNA
  modified_base 1: mod_base = OTHER; note = 2'-O-methyl-guanosine with phosphorothioate linkage
  modified_base 2: mod_base = OTHER; note = 2'-O-methyl-adenosine with phosphorothioate linkage
  modified_base 3: mod_base = OTHER; note = 2'-O-methyl-cytidine
  modified_base 4: mod_base = OTHER; note = 2'-O-methyl-uridine
  modified_base 5: mod_base = OTHER; note = 2'-O-methyl-guanosine
  modified_base 6: mod_base = OTHER; note = 2'-fluoro-cytidine
  modified_base 7: mod_base = OTHER; note = 2'-O-methyl-adenosine
  modified_base 8: mod_base = OTHER; note = 2'-fluoro-adenosine
  modified_base 9: mod_base = OTHER; note = 2'-fluoro-adenosine
  modified_base 10: mod_base = OTHER; note = 2'-fluoro-guanosine
  modified_base 11: mod_base = OTHER; note = 2'-fluoro-cytidine
  modified_base 12: mod_base = OTHER; note = 2'-O-methyl-cytidine
  modified_base 13: mod_base = OTHER; note = 2'-O-methyl-uridine
  modified_base 14: mod_base = OTHER; note = 2'-O-methyl-adenosine
  modified_base 15: mod_base = OTHER; note = 2'-O-methyl-adenosine
  modified_base 16: mod_base = OTHER; note = 2'-O-methyl-uridine
  modified_base 17: mod_base = OTHER; note = 2'-O-methyl-guanosine
  modified_base 18: mod_base = OTHER; note = 2'-O-methyl-adenosine with phosphorothioate linkage
  modified_base 19: mod_base = OTHER; note = 2'-O-methyl-uridine with phosphorothioate linkage
  modified_base 20: mod_base = OTHER; note = 2'-O-methyl-adenosine conjugated to 3 iterations of (2R,3R,4R,5S)-5-(3-(5-(((2R,3R,4R,5R,6R)- 3-acetamido-4,5-dihydroxy-6-(hydroxymethyl)tetrahydro-2H-py ran-2-yl)oxy)pentanamido)propyl)-2-((hydroxyl)methyl)-4-met hoxytetrahydrofuran-3-oxyl
gactgcaaagcctaatgata

SEQ ID NO: 900 - RNA, 20 nt, synthetic construct
  source 1..20: mol_type = other RNA
  modified_base 1: mod_base = OTHER; note = 2'-O-methyl-guanosine with phosphorothioate linkage
  modified_base 2: mod_base = OTHER; note = 2'-O-methyl-adenosine with phosphorothioate linkage
  modified_base 3: mod_base = OTHER; note = 2'-O-methyl-uridine
  modified_base 4: mod_base = OTHER; note = 2'-O-methyl-adenosine
  modified_base 5: mod_base = OTHER; note = 2'-O-methyl-adenosine
  modified_base 6: mod_base = OTHER; note = 2'-fluoro-guanosine
  modified_base 7: mod_base = OTHER; note = 2'-O-methyl-adenosine
  modified_base 8: mod_base = OTHER; note = 2'-fluoro-cytidine
  modified_base 9: mod_base = OTHER; note = 2'-fluoro-adenosine
  modified_base 10: mod_base = OTHER; note = 2'-fluoro-guanosine
  modified_base 11: mod_base = OTHER; note = 2'-fluoro-uridine
  modified_base 12: mod_base = OTHER; note = 2'-O-methyl-adenosine
  modified_base 13: mod_base = OTHER; note = 2'-O-methyl-cytidine
  modified_base 14: mod_base = OTHER; note = 2'-O-methyl-adenosine
  modified_base 15: mod_base = OTHER; note = 2'-O-methyl-guanosine
  modified_base 16: mod_base = OTHER; note = 2'-O-methyl-uridine
  modified_base 17: mod_base = OTHER; note = 2'-O-methyl-adenosine
  modified_base 18: mod_base = OTHER; note = 2'-O-methyl-uridine with phosphorothioate linkage
  modified_base 19: mod_base = OTHER; note = 2'-O-methyl-uridine with phosphorothioate linkage
  modified_base 20: mod_base = OTHER; note = 2'-O-methyl-adenosine conjugated to 3 iterations of (2R,3R,4R,5S)-5-(3-(5-(((2R,3R,4R,5R,6R)- 3-acetamido-4,5-dihydroxy-6-(hydroxymethyl)tetrahydro-2H-py ran-2-yl)oxy)pentanamido)propyl)-2-((hydroxyl)methyl)-4-met hoxytetrahydrofuran-3-oxyl
gataagacagtacagtatta

SEQ ID NO: 901 - RNA, 20 nt, synthetic construct
  source 1..20: mol_type = other RNA
  modified_base 1: mod_base = OTHER; note = 2'-O-methyl-guanosine with phosphorothioate linkage
  modified_base 2: mod_base = OTHER; note = 2'-O-methyl-adenosine with phosphorothioate linkage
  modified_base 3: mod_base = OTHER; note = 2'-O-methyl-cytidine
  modified_base 4: mod_base = OTHER; note = 2'-O-methyl-adenosine
  modified_base 5: mod_base = OTHER; note = 2'-O-methyl-guanosine
  modified_base 6: mod_base = OTHER; note = 2'-fluoro-uridine
  modified_base 7: mod_base = OTHER; note = 2'-O-methyl-adenosine
  modified_base 8: mod_base = OTHER; note = 2'-fluoro-cytidine
  modified_base 9: mod_base = OTHER; note = 2'-fluoro-adenosine
  modified_base 10: mod_base = OTHER; note = 2'-fluoro-guanosine
  modified_base 11: mod_base = OTHER; note = 2'-fluoro-uridine
  modified_base 12: mod_base = OTHER; note = 2'-O-methyl-adenosine
  modified_base 13: mod_base = OTHER; note = 2'-O-methyl-uridine
  modified_base 14: mod_base = OTHER; note = 2'-O-methyl-uridine
  modified_base 15: mod_base = OTHER; note = 2'-O-methyl-uridine
  modified_base 16: mod_base = OTHER; note = 2'-O-methyl-adenosine
  modified_base 17: mod_base = OTHER; note = 2'-O-methyl-adenosine
  modified_base 18: mod_base = OTHER; note = 2'-O-methyl-guanosine with phosphorothioate linkage
  modified_base 19: mod_base = OTHER; note = 2'-O-methyl-uridine with phosphorothioate linkage
  modified_base 20: mod_base = OTHER; note = 2'-O-methyl-adenosine conjugated to 3 iterations of (2R,3R,4R,5S)-5-(3-(5-(((2R,3R,4R,5R,6R)- 3-acetamido-4,5-dihydroxy-6-(hydroxymethyl)tetrahydro-2H-py ran-2-yl)oxy)pentanamido)propyl)-2-((hydroxyl)methyl)-4-met hoxytetrahydrofuran-3-oxyl
gacagtacagtatttaagta

SEQ ID NO: 902 - RNA, 20 nt, synthetic construct
  source 1..20: mol_type = other RNA
  modified_base 1: mod_base = OTHER; note = 2'-O-methyl-cytidine with phosphorothioate linkage
  modified_base 2: mod_base = OTHER; note = 2'-O-methyl-adenosine with phosphorothioate linkage
  modified_base 3: mod_base = OTHER; note = 2'-O-methyl-uridine
  modified_base 4: mod_base = OTHER; note = 2'-O-methyl-guanosine
  modified_base 5: mod_base = OTHER; note = 2'-O-methyl-guanosine
  modified_base 6: mod_base = OTHER; note = 2'-fluoro-guanosine
  modified_base 7: mod_base = OTHER; note = 2'-O-methyl-cytidine
  modified_base 8: mod_base = OTHER; note = 2'-fluoro-adenosine
  modified_base 9: mod_base = OTHER; note = 2'-fluoro-guanosine
  modified_base 10: mod_base = OTHER; note = 2'-fluoro-guanosine
  modified_base 11: mod_base = OTHER; note = 2'-fluoro-adenosine
  modified_base 12: mod_base = OTHER; note = 2'-O-methyl-guanosine
  modified_base 13: mod_base = OTHER; note = 2'-O-methyl-uridine
  modified_base 14: mod_base = OTHER; note = 2'-O-methyl-uridine
  modified_base 15: mod_base = OTHER; note = 2'-O-methyl-guanosine
  modified_base 16: mod_base = OTHER; note = 2'-O-methyl-adenosine
  modified_base 17: mod_base = OTHER; note = 2'-O-methyl-cytidine
  modified_base 18: mod_base = OTHER; note = 2'-O-methyl-uridine with phosphorothioate linkage
  modified_base 19: mod_base = OTHER; note = 2'-O-methyl-uridine with phosphorothioate linkage
  modified_base 20: mod_base = OTHER; note = 2'-O-methyl-adenosine conjugated to 3 iterations of (2R,3R,4R,5S)-5-(3-(5-(((2R,3R,4R,5R,6R)- 3-acetamido-4,5-dihydroxy-6-(hydroxymethyl)tetrahydro-2H-py ran-2-yl)oxy)pentanamido)propyl)-2-((hydroxyl)methyl)-4-met hoxytetrahydrofuran-3-oxyl
catgggcaggagttgactta

SEQ ID NO: 903 - RNA, 20 nt, synthetic construct
  source 1..20: mol_type = other RNA
  modified_base 1: mod_base = OTHER; note = 2'-O-methyl-guanosine with phosphorothioate linkage
  modified_base 2: mod_base = OTHER; note = 2'-O-methyl-guanosine with phosphorothioate linkage
  modified_base 3: mod_base = OTHER; note = 2'-O-methyl-guanosine
  modified_base 4: mod_base = OTHER; note = 2'-O-methyl-cytidine
  modified_base 5: mod_base = OTHER; note = 2'-O-methyl-adenosine
  modified_base 6: mod_base = OTHER; note = 2'-fluoro-guanosine
  modified_base 7: mod_base = OTHER; note = 2'-O-methyl-guanosine
  modified_base 8: mod_base = OTHER; note = 2'-fluoro-adenosine
  modified_base 9: mod_base = OTHER; note = 2'-fluoro-guanosine
  modified_base 10: mod_base = OTHER; note = 2'-fluoro-uridine
  modified_base 11: mod_base = OTHER; note = 2'-fluoro-uridine
  modified_base 12: mod_base = OTHER; note = 2'-O-methyl-guanosine
  modified_base 13: mod_base = OTHER; note = 2'-O-methyl-adenosine
  modified_base 14: mod_base = OTHER; note = 2'-O-methyl-cytidine
  modified_base 15: mod_base = OTHER; note = 2'-O-methyl-uridine
  modified_base 16: mod_base = OTHER; note = 2'-O-methyl-uridine
  modified_base 17: mod_base = OTHER; note = 2'-O-methyl-cytidine
  modified_base 18: mod_base = OTHER; note = 2'-O-methyl-adenosine with phosphorothioate linkage
  modified_base 19: mod_base = OTHER; note = 2'-O-methyl-uridine with phosphorothioate linkage
  modified_base 20: mod_base = OTHER; note = 2'-O-methyl-adenosine conjugated to 3 iterations of (2R,3R,4R,5S)-5-(3-(5-(((2R,3R,4R,5R,6R)- 3-acetamido-4,5-dihydroxy-6-(hydroxymethyl)tetrahydro-2H-py ran-2-yl)oxy)pentanamido)propyl)-2-((hydroxyl)methyl)-4-met hoxytetrahydrofuran-3-oxyl
gggcaggagttgacttcata

SEQ ID NO: 904 - RNA, 20 nt, synthetic construct
  source 1..20: mol_type = other RNA
  modified_base 1: mod_base = OTHER; note = 2'-O-methyl-guanosine with phosphorothioate linkage
  modified_base 2: mod_base = OTHER; note = 2'-O-methyl-uridine with phosphorothioate linkage
  modified_base 3: mod_base = OTHER; note = 2'-O-methyl-uridine
  modified_base 4: mod_base = OTHER; note = 2'-O-methyl-adenosine
  modified_base 5: mod_base = OTHER; note = 2'-O-methyl-guanosine
  modified_base 6: mod_base = OTHER; note = 2'-fluoro-cytidine
  modified_base 7: mod_base = OTHER; note = 2'-O-methyl-adenosine
  modified_base 8: mod_base = OTHER; note = 2'-fluoro-guanosine
  modified_base 9: mod_base = OTHER; note = 2'-fluoro-guanosine
  modified_base 10: mod_base = OTHER; note = 2'-fluoro-adenosine
  modified_base 11: mod_base = OTHER; note = 2'-fluoro-cytidine
  modified_base 12: mod_base = OTHER; note = 2'-O-methyl-uridine
  modified_base 13: mod_base = OTHER; note = 2'-O-methyl-uridine
  modified_base 14: mod_base = OTHER; note = 2'-O-methyl-uridine
  modified_base 15: mod_base = OTHER; note = 2'-O-methyl-uridine
  modified_base 16: mod_base = OTHER; note = 2'-O-methyl-uridine
  modified_base 17: mod_base = OTHER; note = 2'-O-methyl-adenosine
  modified_base 18: mod_base = OTHER; note = 2'-O-methyl-adenosine with phosphorothioate linkage
  modified_base 19: mod_base = OTHER; note = 2'-O-methyl-adenosine with phosphorothioate linkage
  modified_base 20: mod_base = OTHER; note = 2'-O-methyl-adenosine conjugated to 3 iterations of (2R,3R,4R,5S)-5-(3-(5-(((2R,3R,4R,5R,6R)- 3-acetamido-4,5-dihydroxy-6-(hydroxymethyl)tetrahydro-2H-py ran-2-yl)oxy)pentanamido)propyl)-2-((hydroxyl)methyl)-4-met hoxytetrahydrofuran-3-oxyl
gttagcaggactttttaaaa

SEQ ID NO: 905 - RNA, 20 nt, synthetic construct
  source 1..20: mol_type = other RNA
  modified_base 1: mod_base = OTHER; note = 2'-O-methyl-cytidine with phosphorothioate linkage
  modified_base 2: mod_base = OTHER; note = 2'-O-methyl-uridine with phosphorothioate linkage
  modified_base 3: mod_base = OTHER; note = 2'-O-methyl-guanosine
  modified_base 4: mod_base = OTHER; note = 2'-O-methyl-adenosine
  modified_base 5: mod_base = OTHER; note = 2'-O-methyl-adenosine
  modified_base 6: mod_base = OTHER; note = 2'-fluoro-cytidine
  modified_base 7: mod_base = OTHER; note = 2'-O-methyl-cytidine
  modified_base 8: mod_base = OTHER; note = 2'-fluoro-adenosine
  modified_base 9: mod_base = OTHER; note = 2'-fluoro-cytidine
  modified_base 10: mod_base = OTHER; note = 2'-fluoro-uridine
  modified_base 11: mod_base = OTHER; note = 2'-fluoro-adenosine
  modified_base 12: mod_base = OTHER; note = 2'-O-methyl-adenosine
  modified_base 13: mod_base = OTHER; note = 2'-O-methyl-adenosine
  modified_base 14: mod_base = OTHER; note = 2'-O-methyl-cytidine
  modified_base 15: mod_base = OTHER; note = 2'-O-methyl-uridine
  modified_base 16: mod_base = OTHER; note = 2'-O-methyl-uridine
  modified_base 17: mod_base = OTHER; note = 2'-O-methyl-guanosine
  modified_base 18: mod_base = OTHER; note = 2'-O-methyl-uridine with phosphorothioate linkage
  modified_base 19: mod_base = OTHER; note = 2'-O-methyl-uridine with phosphorothioate linkage
  modified_base 20: mod_base = OTHER; note = 2'-O-methyl-adenosine conjugated to 3 iterations of (2R,3R,4R,5S)-5-(3-(5-(((2R,3R,4R,5R,6R)- 3-acetamido-4,5-dihydroxy-6-(hydroxymethyl)tetrahydro-2H-py ran-2-yl)oxy)pentanamido)propyl)-2-((hydroxyl)methyl)-4-met hoxytetrahydrofuran-3-oxyl
ctgaaccactaaacttgtta

SEQ ID NO: 906 - RNA, 20 nt, synthetic construct
  source 1..20: mol_type = other RNA
  modified_base 1: mod_base = OTHER; note = 2'-O-methyl-cytidine with phosphorothioate linkage
  modified_base 2: mod_base = OTHER; note = 2'-O-methyl-cytidine with phosphorothioate linkage
  modified_base 3: mod_base = OTHER; note = 2'-O-methyl-uridine
  modified_base 4: mod_base = OTHER; note = 2'-O-methyl-uridine
  modified_base 5: mod_base = OTHER; note = 2'-O-methyl-guanosine
  modified_base 6: mod_base = OTHER; note = 2'-fluoro-adenosine
  modified_base 7: mod_base = OTHER; note = 2'-O-methyl-adenosine
  modified_base 8: mod_base = OTHER; note = 2'-fluoro-uridine
  modified_base 9: mod_base = OTHER; note = 2'-fluoro-adenosine
  modified_base 10: mod_base = OTHER; note = 2'-fluoro-guanosine
  modified_base 11: mod_base = OTHER; note = 2'-fluoro-uridine
  modified_base 12: mod_base = OTHER; note = 2'-O-methyl-guanosine
  modified_base 13: mod_base = OTHER; note = 2'-O-methyl-cytidine
  modified_base 14: mod_base = OTHER; note = 2'-O-methyl-uridine
  modified_base 15: mod_base = OTHER; note = 2'-O-methyl-uridine
  modified_base 16: mod_base = OTHER; note = 2'-O-methyl-uridine
  modified_base 17: mod_base = OTHER; note = 2'-O-methyl-uridine
  modified_base 18: mod_base = OTHER; note = 2'-O-methyl-cytidine with phosphorothioate linkage
  modified_base 19: mod_base = OTHER; note = 2'-O-methyl-uridine with phosphorothioate linkage
  modified_base 20: mod_base = OTHER; note = 2'-O-methyl-adenosine conjugated to 3 iterations of (2R,3R,4R,5S)-5-(3-(5-(((2R,3R,4R,5R,6R)- 3-acetamido-4,5-dihydroxy-6-(hydroxymethyl)tetrahydro-2H-py ran-2-yl)oxy)pentanamido)propyl)-2-((hydroxyl)methyl)-4-met hoxytetrahydrofuran-3-oxyl
ccttgaatagtgcttttcta

SEQ ID NO: 907 - RNA, 20 nt, synthetic construct
  source 1..20: mol_type = other RNA
  modified_base 1: mod_base = OTHER; note = 2'-O-methyl-guanosine with phosphorothioate linkage
  modified_base 2: mod_base = OTHER; note = 2'-O-methyl-adenosine with phosphorothioate linkage
  modified_base 3: mod_base = OTHER; note = 2'-O-methyl-adenosine
  modified_base 4: mod_base = OTHER; note = 2'-O-methyl-cytidine
  modified_base 5: mod_base = OTHER; note = 2'-O-methyl-cytidine
  modified_base 6: mod_base = OTHER; note = 2'-fluoro-adenosine
  modified_base 7: mod_base = OTHER; note = 2'-O-methyl-uridine
  modified_base 8: mod_base = OTHER; note = 2'-fluoro-adenosine
  modified_base 9: mod_base = OTHER; note = 2'-fluoro-uridine
  modified_base 10: mod_base = OTHER; note = 2'-fluoro-cytidine
  modified_base 11: mod_base = OTHER; note = 2'-fluoro-uridine
  modified_base 12: mod_base = OTHER; note = 2'-O-methyl-guanosine
  modified_base 13: mod_base = OTHER; note = 2'-O-methyl-uridine
  modified_base 14: mod_base = OTHER; note = 2'-O-methyl-uridine
  modified_base 15: mod_base = OTHER; note = 2'-O-methyl-guanosine
  modified_base 16: mod_base = OTHER; note = 2'-O-methyl-adenosine
  modified_base 17: mod_base = OTHER; note = 2'-O-methyl-cytidine
  modified_base 18: mod_base = OTHER; note = 2'-O-methyl-adenosine with phosphorothioate linkage
  modified_base 19: mod_base = OTHER; note = 2'-O-methyl-uridine with phosphorothioate linkage
  modified_base 20: mod_base = OTHER; note = 2'-O-methyl-adenosine conjugated to 3 iterations of (2R,3R,4R,5S)-5-(3-(5-(((2R,3R,4R,5R,6R)- 3-acetamido-4,5-dihydroxy-6-(hydroxymethyl)tetrahydro-2H-py ran-2-yl)oxy)pentanamido)propyl)-2-((hydroxyl)methyl)-4-met hoxytetrahydrofuran-3-oxyl
gaaccatatctgttgacata

SEQ ID NO: 908 - RNA, 20 nt, synthetic construct
  source 1..20: mol_type = other RNA
  modified_base 1: mod_base = OTHER; note = 2'-O-methyl-cytidine with phosphorothioate linkage
  modified_base 2: mod_base = OTHER; note = 2'-O-methyl-cytidine with phosphorothioate linkage
  modified_base 3: mod_base = OTHER; note = 2'-O-methyl-adenosine
  modified_base 4: mod_base = OTHER; note = 2'-O-methyl-uridine
  modified_base 5: mod_base = OTHER; note = 2'-O-methyl-adenosine
  modified_base 6: mod_base = OTHER; note = 2'-fluoro-uridine
  modified_base 7: mod_base = OTHER; note = 2'-O-methyl-cytidine
  modified_base 8: mod_base = OTHER; note = 2'-fluoro-uridine
  modified_base 9: mod_base = OTHER; note = 2'-fluoro-guanosine
  modified_base 10: mod_base = OTHER; note = 2'-fluoro-uridine
  modified_base 11: mod_base = OTHER; note = 2'-fluoro-uridine
  modified_base 12: mod_base = OTHER; note = 2'-O-methyl-guanosine
  modified_base 13: mod_base = OTHER; note = 2'-O-methyl-adenosine
  modified_base 14: mod_base = OTHER; note = 2'-O-methyl-cytidine
  modified_base 15: mod_base = OTHER; note = 2'-O-methyl-adenosine
  modified_base 16: mod_base = OTHER; note = 2'-O-methyl-uridine
  modified_base 17: mod_base = OTHER; note = 2'-O-methyl-uridine
  modified_base 18: mod_base = OTHER; note = 2'-O-methyl-uridine with phosphorothioate linkage
  modified_base 19: mod_base = OTHER; note = 2'-O-methyl-uridine with phosphorothioate linkage
  modified_base 20: mod_base = OTHER; note = 2'-O-methyl-adenosine conjugated to 3 iterations of (2R,3R,4R,5S)-5-(3-(5-(((2R,3R,4R,5R,6R)- 3-acetamido-4,5-dihydroxy-6-(hydroxymethyl)tetrahydro-2H-py ran-2-yl)oxy)pentanamido)propyl)-2-((hydroxyl)methyl)-4-met hoxytetrahydrofuran-3-oxyl
ccatatctgttgacatttta

SEQ ID NO: 909 - RNA, 20 nt, synthetic construct
  source 1..20: mol_type = other RNA
  modified_base 1: mod_base = OTHER; note = 2'-O-methyl-cytidine with phosphorothioate linkage
  modified_base 2: mod_base = OTHER; note = 2'-O-methyl-adenosine with phosphorothioate linkage
  modified_base 3: mod_base = OTHER; note = 2'-O-methyl-guanosine
  modified_base 4: mod_base = OTHER; note = 2'-O-methyl-adenosine
  modified_base 5: mod_base = OTHER; note = 2'-O-methyl-guanosine
  modified_base 6: mod_base = OTHER; note = 2'-fluoro-guanosine
  modified_base 7: mod_base = OTHER; note = 2'-O-methyl-uridine
  modified_base 8: mod_base = OTHER; note = 2'-fluoro-cytidine
  modified_base 9: mod_base = OTHER; note = 2'-fluoro-cytidine
  modified_base 10: mod_base = OTHER; note = 2'-fluoro-cytidine
  modified_base 11: mod_base = OTHER; note = 2'-fluoro-uridine
  modified_base 12: mod_base = OTHER; note = 2'-O-methyl-adenosine
  modified_base 13: mod_base = OTHER; note = 2'-O-methyl-uridine
  modified_base 14: mod_base = OTHER; note = 2'-O-methyl-uridine
  modified_base 15: mod_base = OTHER; note = 2'-O-methyl-uridine
  modified_base 16: mod_base = OTHER; note = 2'-O-methyl-cytidine
  modified_base 17: mod_base = OTHER; note = 2'-O-methyl-cytidine
  modified_base 18: mod_base = OTHER; note = 2'-O-methyl-uridine with phosphorothioate linkage
  modified_base 19: mod_base = OTHER; note = 2'-O-methyl-uridine with phosphorothioate linkage
  modified_base 20: mod_base = OTHER; note = 2'-O-methyl-adenosine conjugated to 3 iterations of (2R,3R,4R,5S)-5-(3-(5-(((2R,3R,4R,5R,6R)- 3-acetamido-4,5-dihydroxy-6-(hydroxymethyl)tetrahydro-2H-py ran-2-yl)oxy)pentanamido)propyl)-2-((hydroxyl)methyl)-4-met hoxytetrahydrofuran-3-oxyl
cagaggtccctatttcctta

SEQ ID NO: 910 - RNA, 20 nt, synthetic construct
  source 1..20: mol_type = other RNA
  modified_base 1: mod_base = OTHER; note = 2'-O-methyl-guanosine with phosphorothioate linkage
  modified_base 2: mod_base = OTHER; note = 2'-O-methyl-guanosine with phosphorothioate linkage
  modified_base 3: mod_base = OTHER; note = 2'-O-methyl-uridine
  modified_base 4: mod_base = OTHER; note = 2'-O-methyl-cytidine
  modified_base 5: mod_base = OTHER; note = 2'-O-methyl-cytidine
  modified_base 6: mod_base = OTHER; note = 2'-fluoro-cytidine
  modified_base 7: mod_base = OTHER; note = 2'-O-methyl-uridine
  modified_base 8: mod_base = OTHER; note = 2'-fluoro-adenosine
  modified_base 9: mod_base = OTHER; note = 2'-fluoro-uridine
  modified_base 10: mod_base = OTHER; note = 2'-fluoro-uridine
  modified_base 11: mod_base = OTHER; note = 2'-fluoro-uridine
  modified_base 12: mod_base = OTHER; note = 2'-O-methyl-cytidine
  modified_base 13: mod_base = OTHER; note = 2'-O-methyl-cytidine
  modified_base 14: mod_base = OTHER; note = 2'-O-methyl-uridine
  modified_base 15: mod_base = OTHER; note = 2'-O-methyl-uridine
  modified_base 16: mod_base = OTHER; note = 2'-O-methyl-uridine
  modified_base 17: mod_base = OTHER; note = 2'-O-methyl-guanosine
  modified_base 18: mod_base = OTHER; note = 2'-O-methyl-uridine with phosphorothioate linkage
  modified_base 19: mod_base = OTHER; note = 2'-O-methyl-adenosine with phosphorothioate linkage
  modified_base 20: mod_base = OTHER; note = 2'-O-methyl-adenosine conjugated to 3 iterations of (2R,3R,4R,5S)-5-(3-(5-(((2R,3R,4R,5R,6R)- 3-acetamido-4,5-dihydroxy-6-(hydroxymethyl)tetrahydro-2H-py ran-2-yl)oxy)pentanamido)propyl)-2-((hydroxyl)methyl)-4-met hoxytetrahydrofuran-3-oxyl
ggtccctatttcctttgtaa

SEQ ID NO: 911 - RNA, 20 nt, synthetic construct
  source 1..20: mol_type = other RNA
  modified_base 1: mod_base = OTHER; note = 2'-O-methyl-cytidine with phosphorothioate linkage
  modified_base 2: mod_base = OTHER; note = 2'-O-methyl-cytidine with phosphorothioate linkage
  modified_base 3: mod_base = OTHER; note = 2'-O-methyl-cytidine
  modified_base 4: mod_base = OTHER; note = 2'-O-methyl-uridine
  modified_base 5: mod_base = OTHER; note = 2'-O-methyl-adenosine
  modified_base 6: mod_base = OTHER; note = 2'-fluoro-uridine
  modified_base 7: mod_base = OTHER; note = 2'-O-methyl-uridine
  modified_base 8: mod_base = OTHER; note = 2'-fluoro-uridine
  modified_base 9: mod_base = OTHER; note = 2'-fluoro-cytidine
  modified_base 10: mod_base = OTHER; note = 2'-fluoro-cytidine
  modified_base 11: mod_base = OTHER; note = 2'-fluoro-uridine
  modified_base 12: mod_base = OTHER; note = 2'-O-methyl-uridine
  modified_base 13: mod_base = OTHER; note = 2'-O-methyl-uridine
  modified_base 14: mod_base = OTHER; note = 2'-O-methyl-guanosine
  modified_base 15: mod_base = OTHER; note = 2'-O-methyl-uridine
  modified_base 16: mod_base = OTHER; note = 2'-O-methyl-adenosine
  modified_base 17: mod_base = OTHER; note = 2'-O-methyl-cytidine
  modified_base 18: mod_base = OTHER; note = 2'-O-methyl-adenosine with phosphorothioate linkage
  modified_base 19: mod_base = OTHER; note = 2'-O-methyl-uridine with phosphorothioate linkage
  modified_base 20: mod_base = OTHER; note = 2'-O-methyl-adenosine conjugated to 3 iterations of (2R,3R,4R,5S)-5-(3-(5-(((2R,3R,4R,5R,6R)- 3-acetamido-4,5-dihydroxy-6-(hydroxymethyl)tetrahydro-2H-py ran-2-yl)oxy)pentanamido)propyl)-2-((hydroxyl)methyl)-4-met hoxytetrahydrofuran-3-oxyl
ccctatttcctttgtacata

SEQ ID NO: 912 - RNA, 20 nt, synthetic construct
  source 1..20: mol_type = other RNA
  modified_base 1: mod_base = OTHER; note = 2'-O-methyl-cytidine with phosphorothioate linkage
  modified_base 2: mod_base = OTHER; note = 2'-O-methyl-cytidine with phosphorothioate linkage
  modified_base 3: mod_base = OTHER; note = 2'-O-methyl-uridine
  modified_base 4: mod_base = OTHER; note = 2'-O-methyl-adenosine
  modified_base 5: mod_base = OTHER; note = 2'-O-methyl-uridine
  modified_base 6: mod_base = OTHER; note = 2'-fluoro-uridine
  modified_base 7: mod_base = OTHER; note = 2'-O-methyl-uridine
  modified_base 8: mod_base = OTHER; note = 2'-fluoro-cytidine
  modified_base 9: mod_base = OTHER; note = 2'-fluoro-cytidine
  modified_base 10: mod_base = OTHER; note = 2'-fluoro-uridine
  modified_base 11: mod_base = OTHER; note = 2'-fluoro-uridine
  modified_base 12: mod_base = OTHER; note = 2'-O-methyl-uridine
  modified_base 13: mod_base = OTHER; note = 2'-O-methyl-guanosine
  modified_base 14: mod_base = OTHER; note = 2'-O-methyl-uridine
  modified_base 15: mod_base = OTHER; note = 2'-O-methyl-adenosine
  modified_base 16: mod_base = OTHER; note = 2'-O-methyl-cytidine
  modified_base 17: mod_base = OTHER; note = 2'-O-methyl-adenosine
  modified_base 18: mod_base = OTHER; note = 2'-O-methyl-uridine with phosphorothioate linkage
  modified_base 19: mod_base = OTHER; note = 2'-O-methyl-adenosine with phosphorothioate linkage
  modified_base 20: mod_base = OTHER; note = 2'-O-methyl-adenosine conjugated to 3 iterations of (2R,3R,4R,5S)-5-(3-(5-(((2R,3R,4R,5R,6R)- 3-acetamido-4,5-dihydroxy-6-(hydroxymethyl)tetrahydro-2H-py ran-2-yl)oxy)pentanamido)propyl)-2-((hydroxyl)methyl)-4-met hoxytetrahydrofuran-3-oxyl
cctatttcctttgtacataa

SEQ ID NO: 913 - RNA, 20 nt, synthetic construct
  source 1..20: mol_type = other RNA
  modified_base 1: mod_base = OTHER; note = 2'-O-methyl-cytidine with phosphorothioate linkage
  modified_base 2: mod_base = OTHER; note = 2'-O-methyl-adenosine with phosphorothioate linkage
  modified_base 3: mod_base = OTHER; note = 2'-O-methyl-cytidine
  modified_base 4: mod_base = OTHER; note = 2'-O-methyl-uridine
  modified_base 5: mod_base = OTHER; note = 2'-O-methyl-uridine
  modified_base 6: mod_base = OTHER; note = 2'-fluoro-adenosine
  modified_base 7: mod_base = OTHER; note = 2'-O-methyl-guanosine
  modified_base 8: mod_base = OTHER; note = 2'-fluoro-adenosine
  modified_base 9: mod_base = OTHER; note = 2'-fluoro-adenosine
  modified_base 10: mod_base = OTHER; note = 2'-fluoro-adenosine
  modified_base 11: mod_base = OTHER; note = 2'-fluoro-guanosine
  modified_base 12: mod_base = OTHER; note = 2'-O-methyl-adenosine
  modified_base 13: mod_base = OTHER; note = 2'-O-methyl-adenosine
  modified_base 14: mod_base = OTHER; note = 2'-O-methyl-adenosine
  modified_base 15: mod_base = OTHER; note = 2'-O-methyl-adenosine
  modified_base 16: mod_base = OTHER; note = 2'-O-methyl-guanosine
  modified_base 17: mod_base = OTHER; note = 2'-O-methyl-adenosine
  modified_base 18: mod_base = OTHER; note = 2'-O-methyl-cytidine with phosphorothioate linkage
  modified_base 19: mod_base = OTHER; note = 2'-O-methyl-adenosine with phosphorothioate linkage
  modified_base 20: mod_base = OTHER; note = 2'-O-methyl-adenosine conjugated to 3 iterations of (2R,3R,4R,5S)-5-(3-(5-(((2R,3R,4R,5R,6R)- 3-acetamido-4,5-dihydroxy-6-(hydroxymethyl)tetrahydro-2H-py ran-2-yl)oxy)pentanamido)propyl)-2-((hydroxyl)methyl)-4-met hoxytetrahydrofuran-3-oxyl
cacttagaaagaaaagacaa

SEQ ID NO: 914 - RNA, 20 nt, synthetic construct
  source 1..20: mol_type = other RNA
  modified_base 1: mod_base = OTHER; note = 2'-O-methyl-guanosine with phosphorothioate linkage
  modified_base 2: mod_base = OTHER; note = 2'-O-methyl-uridine with phosphorothioate linkage
  modified_base 3: mod_base = OTHER; note = 2'-O-methyl-guanosine
  modified_base 4: mod_base = OTHER; note = 2'-O-methyl-guanosine
  modified_base 5: mod_base = OTHER; note = 2'-O-methyl-adenosine
  modified_base 6: mod_base = OTHER; note = 2'-fluoro-cytidine
  modified_base 7: mod_base = OTHER; note = 2'-O-methyl-adenosine
  modified_base 8: mod_base = OTHER; note = 2'-fluoro-cytidine
  modified_base 9: mod_base = OTHER; note = 2'-fluoro-adenosine
  modified_base 10: mod_base = OTHER; note = 2'-fluoro-guanosine
  modified_base 11: mod_base = OTHER; note = 2'-fluoro-adenosine
  modified_base 12: mod_base = OTHER; note = 2'-O-methyl-guanosine
  modified_base 13: mod_base = OTHER; note = 2'-O-methyl-uridine
  modified_base 14: mod_base = OTHER; note = 2'-O-methyl-adenosine
  modified_base 15: mod_base = OTHER; note = 2'-O-methyl-adenosine
  modified_base 16: mod_base = OTHER; note = 2'-O-methyl-uridine
  modified_base 17: mod_base = OTHER; note = 2'-O-methyl-guanosine
  modified_base 18: mod_base = OTHER; note = 2'-O-methyl-adenosine with phosphorothioate linkage
  modified_base 19: mod_base = OTHER; note = 2'-O-methyl-adenosine with phosphorothioate linkage
  modified_base 20: mod_base = OTHER; note = 2'-O-methyl-adenosine conjugated to 3 iterations of (2R,3R,4R,5S)-5-(3-(5-(((2R,3R,4R,5R,6R)- 3-acetamido-4,5-dihydroxy-6-(hydroxymethyl)tetrahydro-2H-py ran-2-yl)oxy)pentanamido)propyl)-2-((hydroxyl)methyl)-4-met hoxytetrahydrofuran-3-oxyl
gtggacacagagtaatgaaa

SEQ ID NO: 915 - RNA, 20 nt, synthetic construct
  source 1..20: mol_type = other RNA
  modified_base 1: mod_base = OTHER; note = 2'-O-methyl-guanosine with phosphorothioate linkage
  modified_base 2: mod_base = OTHER; note = 2'-O-methyl-adenosine with phosphorothioate linkage
  modified_base 3: mod_base = OTHER; note = 2'-O-methyl-uridine
  modified_base 4: mod_base = OTHER; note = 2'-O-methyl-adenosine
  modified_base 5: mod_base = OTHER; note = 2'-O-methyl-guanosine
  modified_base 6: mod_base = OTHER; note = 2'-fluoro-uridine
  modified_base 7: mod_base = OTHER; note = 2'-O-methyl-adenosine
  modified_base 8: mod_base = OTHER; note = 2'-fluoro-cytidine
  modified_base 9: mod_base = OTHER; note = 2'-fluoro-adenosine
  modified_base 10: mod_base = OTHER; note = 2'-fluoro-uridine
  modified_base 11: mod_base = OTHER; note = 2'-fluoro-guanosine
  modified_base 12: mod_base = OTHER; note = 2'-O-methyl-uridine
  modified_base 13: mod_base = OTHER; note = 2'-O-methyl-uridine
  modified_base 14: mod_base = OTHER; note = 2'-O-methyl-adenosine
  modified_base 15: mod_base = OTHER; note = 2'-O-methyl-guanosine
  modified_base 16: mod_base = OTHER; note = 2'-O-methyl-cytidine
  modified_base 17: mod_base = OTHER; note = 2'-O-methyl-adenosine
  modified_base 18: mod_base = OTHER; note = 2'-O-methyl-uridine with phosphorothioate linkage
  modified_base 19: mod_base = OTHER; note = 2'-O-methyl-adenosine with phosphorothioate linkage
  modified_base 20: mod_base = OTHER; note = 2'-O-methyl-adenosine conjugated to 3 iterations of (2R,3R,4R,5S)-5-(3-(5-(((2R,3R,4R,5R,6R)- 3-acetamido-4,5-dihydroxy-6-(hydroxymethyl)tetrahydro-2H-py ran-2-yl)oxy)pentanamido)propyl)-2-((hydroxyl)methyl)-4-met hoxytetrahydrofuran-3-oxyl
gatagtacatgttagcataa

SEQ ID NO: 916 - RNA, 20 nt, synthetic construct
  source 1..20: mol_type = other RNA
  modified_base 1: mod_base = OTHER; note = 2'-O-methyl-cytidine with phosphorothioate linkage
  modified_base 2: mod_base = OTHER; note = 2'-O-methyl-guanosine with phosphorothioate linkage
  modified_base 3: mod_base = OTHER; note = 2'-O-methyl-uridine
  modified_base 4: mod_base = OTHER; note = 2'-O-methyl-guanosine
  modified_base 5: mod_base = OTHER; note = 2'-O-methyl-guanosine
  modified_base 6: mod_base = OTHER; note = 2'-fluoro-uridine
  modified_base 7: mod_base = OTHER; note = 2'-O-methyl-guanosine
  modified_base 8: mod_base = OTHER; note = 2'-fluoro-guanosine
  modified_base 9: mod_base = OTHER; note = 2'-fluoro-adenosine
  modified_base 10: mod_base = OTHER; note = 2'-fluoro-adenosine
  modified_base 11: mod_base = OTHER; note = 2'-fluoro-cytidine
  modified_base 12: mod_base = OTHER; note = 2'-O-methyl-cytidine
  modified_base 13: mod_base = OTHER; note = 2'-O-methyl-cytidine
  modified_base 14: mod_base = OTHER; note = 2'-O-methyl-uridine
  modified_base 15: mod_base = OTHER; note = 2'-O-methyl-uridine
  modified_base 16: mod_base = OTHER; note = 2'-O-methyl-uridine
  modified_base 17: mod_base = OTHER; note = 2'-O-methyl-uridine
  modified_base 18: mod_base = OTHER; note = 2'-O-methyl-adenosine with phosphorothioate linkage
  modified_base 19: mod_base = OTHER; note = 2'-O-methyl-uridine with phosphorothioate linkage
  modified_base 20: mod_base = OTHER; note = 2'-O-methyl-adenosine conjugated to 3 iterations of (2R,3R,4R,5S)-5-(3-(5-(((2R,3R,4R,5R,6R)- 3-acetamido-4,5-dihydroxy-6-(hydroxymethyl)tetrahydro-2H-py ran-2-yl)oxy)pentanamido)propyl)-2-((hydroxyl)methyl)-4-met hoxytetrahydrofuran-3-oxyl
cgtggtggaacccttttata

SEQ ID NO: 917 - RNA, 20 nt, synthetic construct
  source 1..20: mol_type = other RNA
  modified_base 1: mod_base = OTHER; note = 2'-O-methyl-guanosine with phosphorothioate linkage
  modified_base 2: mod_base = OTHER; note = 2'-O-methyl-uridine with phosphorothioate linkage
  modified_base 3: mod_base = OTHER; note = 2'-O-methyl-guanosine
  modified_base 4: mod_base = OTHER; note = 2'-O-methyl-guanosine
  modified_base 5: mod_base = OTHER; note = 2'-O-methyl-uridine
  modified_base 6: mod_base = OTHER; note = 2'-fluoro-guanosine
  modified_base 7: mod_base = OTHER; note = 2'-O-methyl-guanosine
  modified_base 8: mod_base = OTHER; note = 2'-fluoro-adenosine
  modified_base 9: mod_base = OTHER; note = 2'-fluoro-adenosine
  modified_base 10: mod_base = OTHER; note = 2'-fluoro-cytidine
  modified_base 11: mod_base = OTHER; note = 2'-fluoro-cytidine
  modified_base 12: mod_base = OTHER; note = 2'-O-methyl-cytidine
  modified_base 13: mod_base = OTHER; note = 2'-O-methyl-uridine
  modified_base 14: mod_base = OTHER; note = 2'-O-methyl-uridine
  modified_base 15: mod_base = OTHER; note = 2'-O-methyl-uridine
  modified_base 16: mod_base = OTHER; note = 2'-O-methyl-uridine
  modified_base 17: mod_base = OTHER; note = 2'-O-methyl-adenosine
  modified_base 18: mod_base = OTHER; note = 2'-O-methyl-uridine with phosphorothioate linkage
  modified_base 19: mod_base = OTHER; note = 2'-O-methyl-uridine with phosphorothioate linkage
  modified_base 20: mod_base = OTHER; note = 2'-O-methyl-adenosine conjugated to 3 iterations of (2R,3R,4R,5S)-5-(3-(5-(((2R,3R,4R,5R,6R)- 3-acetamido-4,5-dihydroxy-6-(hydroxymethyl)tetrahydro-2H-py ran-2-yl)oxy)pentanamido)propyl)-2-((hydroxyl)methyl)-4-met hoxytetrahydrofuran-3-oxyl
gtggtggaacccttttatta

SEQ ID NO: 918 - RNA, 20 nt, synthetic construct
  source 1..20: mol_type = other RNA
  modified_base 1: mod_base = OTHER; note = 2'-O-methyl-guanosine with phosphorothioate linkage
  modified_base 2: mod_base = OTHER; note = 2'-O-methyl-guanosine with phosphorothioate linkage
  modified_base 3: mod_base = OTHER; note = 2'-O-methyl-uridine
  modified_base 4: mod_base = OTHER; note = 2'-O-methyl-guanosine
  modified_base 5: mod_base = OTHER; note = 2'-O-methyl-guanosine
  modified_base 6: mod_base = OTHER; note = 2'-fluoro-adenosine
  modified_base 7: mod_base = OTHER; note = 2'-O-methyl-adenosine
  modified_base 8: mod_base = OTHER; note = 2'-fluoro-cytidine
  modified_base 9: mod_base = OTHER; note = 2'-fluoro-cytidine
  modified_base 10: mod_base = OTHER; note = 2'-fluoro-cytidine
  modified_base 11: mod_base = OTHER; note = 2'-fluoro-uridine
  modified_base 12: mod_base = OTHER; note = 2'-O-methyl-uridine
  modified_base 13: mod_base = OTHER; note = 2'-O-methyl-uridine
  modified_base 14: mod_base = OTHER; note = 2'-O-methyl-uridine
  modified_base 15: mod_base = OTHER; note = 2'-O-methyl-adenosine
  modified_base 16: mod_base = OTHER; note = 2'-O-methyl-uridine
  modified_base 17: mod_base = OTHER; note = 2'-O-methyl-uridine
  modified_base 18: mod_base = OTHER; note = 2'-O-methyl-adenosine with phosphorothioate linkage
  modified_base 19: mod_base = OTHER; note = 2'-O-methyl-adenosine with phosphorothioate linkage
  modified_base 20: mod_base = OTHER; note = 2'-O-methyl-adenosine conjugated to 3 iterations of (2R,3R,4R,5S)-5-(3-(5-(((2R,3R,4R,5R,6R)- 3-acetamido-4,5-dihydroxy-6-(hydroxymethyl)tetrahydro-2H-py ran-2-yl)oxy)pentanamido)propyl)-2-((hydroxyl)methyl)-4-met hoxytetrahydrofuran-3-oxyl
ggtggaacccttttattaaa

SEQ ID NO: 919 - RNA, 20 nt, synthetic construct
  source 1..20: mol_type = other RNA
  modified_base 1: mod_base = OTHER; note = 2'-O-methyl-cytidine with phosphorothioate linkage
  modified_base 2: mod_base = OTHER; note = 2'-O-methyl-uridine with phosphorothioate linkage
  modified_base 3: mod_base = OTHER; note = 2'-O-methyl-adenosine
  modified_base 4: mod_base = OTHER; note = 2'-O-methyl-uridine
  modified_base 5: mod_base = OTHER; note = 2'-O-methyl-cytidine
  modified_base 6: mod_base = OTHER; note = 2'-fluoro-cytidine
  modified_base 7: mod_base = OTHER; note = 2'-O-methyl-cytidine
  modified_base 8: mod_base = OTHER; note = 2'-fluoro-adenosine
  modified_base 9: mod_base = OTHER; note = 2'-fluoro-uridine
  modified_base 10: mod_base = OTHER; note = 2'-fluoro-adenosine
  modified_base 11: mod_base = OTHER; note = 2'-fluoro-uridine
  modified_base 12: mod_base = OTHER; note = 2'-O-methyl-uridine
  modified_base 13: mod_base = OTHER; note = 2'-O-methyl-uridine
  modified_base 14: mod_base = OTHER; note = 2'-O-methyl-adenosine
  modified_base 15: mod_base = OTHER; note = 2'-O-methyl-adenosine
  modified_base 16: mod_base = OTHER; note = 2'-O-methyl-cytidine
  modified_base 17: mod_base = OTHER; note = 2'-O-methyl-uridine
  modified_base 18: mod_base = OTHER; note = 2'-O-methyl-guanosine with phosphorothioate linkage
  modified_base 19: mod_base = OTHER; note = 2'-O-methyl-uridine with phosphorothioate linkage
  modified_base 20: mod_base = OTHER; note = 2'-O-methyl-adenosine conjugated to 3 iterations of (2R,3R,4R,5S)-5-(3-(5-(((2R,3R,4R,5R,6R)- 3-acetamido-4,5-dihydroxy-6-(hydroxymethyl)tetrahydro-2H-py ran-2-yl)oxy)pentanamido)propyl)-2-((hydroxyl)methyl)-4-met hoxytetrahydrofuran-3-oxyl
ctatcccatatttaactgta

SEQ ID NO: 920 - RNA, 20 nt, synthetic construct
  source 1..20: mol_type = other RNA
  modified_base 1: mod_base = OTHER; note = 2'-O-methyl-cytidine with phosphorothioate linkage
  modified_base 2: mod_base = OTHER; note = 2'-O-methyl-cytidine with phosphorothioate linkage
  modified_base 3: mod_base = OTHER; note = 2'-O-methyl-cytidine
  modified_base 4: mod_base = OTHER; note = 2'-O-methyl-adenosine
  modified_base 5: mod_base = OTHER; note = 2'-O-methyl-uridine
  modified_base 6: mod_base = OTHER; note = 2'-fluoro-adenosine
  modified_base 7: mod_base = OTHER; note = 2'-O-methyl-uridine
  modified_base 8: mod_base = OTHER; note = 2'-fluoro-uridine
  modified_base 9: mod_base = OTHER; note = 2'-fluoro-uridine
  modified_base 10: mod_base = OTHER; note = 2'-fluoro-adenosine
  modified_base 11: mod_base = OTHER; note = 2'-fluoro-adenosine
  modified_base 12: mod_base = OTHER; note = 2'-O-methyl-cytidine
  modified_base 13: mod_base = OTHER; note = 2'-O-methyl-uridine
  modified_base 14: mod_base = OTHER; note = 2'-O-methyl-guanosine
  modified_base 15: mod_base = OTHER; note = 2'-O-methyl-uridine
  modified_base 16: mod_base = OTHER; note = 2'-O-methyl-uridine
  modified_base 17: mod_base = OTHER; note = 2'-O-methyl-cytidine
  modified_base 18: mod_base = OTHER; note = 2'-O-methyl-uridine with phosphorothioate linkage
  modified_base 19: mod_base = OTHER; note = 2'-O-methyl-adenosine with phosphorothioate linkage
  modified_base 20: mod_base = OTHER; note = 2'-O-methyl-adenosine conjugated to 3 iterations of (2R,3R,4R,5S)-5-(3-(5-(((2R,3R,4R,5R,6R)- 3-acetamido-4,5-dihydroxy-6-(hydroxymethyl)tetrahydro-2H-py ran-2-yl)oxy)pentanamido)propyl)-2-((hydroxyl)methyl)-4-met hoxytetrahydrofuran-3-oxyl
cccatatttaactgttctaa

SEQ ID NO: 921 - RNA, 20 nt, synthetic construct
  source 1..20: mol_type = other RNA
  modified_base 1: mod_base = OTHER; note = 2'-O-methyl-guanosine with phosphorothioate linkage
  modified_base 2: mod_base = OTHER; note = 2'-O-methyl-cytidine with phosphorothioate linkage
  modified_base 3: mod_base = OTHER; note = 2'-O-methyl-uridine
  modified_base 4: mod_base = OTHER; note = 2'-O-methyl-cytidine
  modified_base 5: mod_base = OTHER; note = 2'-O-methyl-uridine
  modified_base 6: mod_base = OTHER; note = 2'-fluoro-cytidine
  modified_base 7: mod_base = OTHER; note = 2'-O-methyl-adenosine
  modified_base 8: mod_base = OTHER; note = 2'-fluoro-uridine
  modified_base 9: mod_base = OTHER; note = 2'-fluoro-cytidine
  modified_base 10: mod_base = OTHER; note = 2'-fluoro-cytidine
  modified_base 11: mod_base = OTHER; note = 2'-fluoro-adenosine
  modified_base 12: mod_base = OTHER; note = 2'-O-methyl-cytidine
  modified_base 13: mod_base = OTHER; note = 2'-O-methyl-uridine
  modified_base 14: mod_base = OTHER; note = 2'-O-methyl-uridine
  modified_base 15: mod_base = OTHER; note = 2'-O-methyl-adenosine
  modified_base 16: mod_base = OTHER; note = 2'-O-methyl-uridine
  modified_base 17: mod_base = OTHER; note = 2'-O-methyl-uridine
  modified_base 18: mod_base = OTHER; note = 2'-O-methyl-adenosine with phosphorothioate linkage
  modified_base 19: mod_base = OTHER; note = 2'-O-methyl-adenosine with phosphorothioate linkage
  modified_base 20: mod_base = OTHER; note = 2'-O-methyl-adenosine conjugated to 3 iterations of (2R,3R,4R,5S)-5-(3-(5-(((2R,3R,4R,5R,6R)- 3-acetamido-4,5-dihydroxy-6-(hydroxymethyl)tetrahydro-2H-py ran-2-yl)oxy)pentanamido)propyl)-2-((hydroxyl)methyl)-4-met hoxytetrahydrofuran-3-oxyl
gctctcatccacttattaaa

SEQ ID NO: 922 - RNA, 20 nt, synthetic construct
  source 1..20: mol_type = other RNA
  modified_base 1: mod_base = OTHER; note = 2'-O-methyl-cytidine with phosphorothioate linkage
  modified_base 2: mod_base = OTHER; note = 2'-O-methyl-adenosine with phosphorothioate linkage
  modified_base 3: mod_base = OTHER; note = 2'-O-methyl-cytidine
  modified_base 4: mod_base = OTHER; note = 2'-O-methyl-adenosine
  modified_base 5: mod_base = OTHER; note = 2'-O-methyl-adenosine
  modified_base 6: mod_base = OTHER; note = 2'-fluoro-uridine
  modified_base 7: mod_base = OTHER; note = 2'-O-methyl-adenosine
  modified_base 8: mod_base = OTHER; note = 2'-fluoro-uridine
  modified_base 9: mod_base = OTHER; note = 2'-fluoro-cytidine
  modified_base 10: mod_base = OTHER; note = 2'-fluoro-guanosine
  modified_base 11: mod_base = OTHER; note = 2'-fluoro-guanosine
  modified_base 12: mod_base = OTHER; note = 2'-O-methyl-guanosine
  modified_base 13: mod_base = OTHER; note = 2'-O-methyl-uridine
  modified_base 14: mod_base = OTHER; note = 2'-O-methyl-adenosine
  modified_base 15: mod_base = OTHER; note = 2'-O-methyl-cytidine
  modified_base 16: mod_base = OTHER; note = 2'-O-methyl-adenosine
  modified_base 17: mod_base = OTHER; note = 2'-O-methyl-adenosine
  modified_base 18: mod_base = OTHER; note = 2'-O-methyl-guanosine with phosphorothioate linkage
  modified_base 19: mod_base = OTHER; note = 2'-O-methyl-adenosine with phosphorothioate linkage
  modified_base 20: mod_base = OTHER; note = 2'-O-methyl-adenosine conjugated to 3 iterations of (2R,3R,4R,5S)-5-(3-(5-(((2R,3R,4R,5R,6R)- 3-acetamido-4,5-dihydroxy-6-(hydroxymethyl)tetrahydro-2H-py ran-2-yl)oxy)pentanamido)propyl)-2-((hydroxyl)methyl)-4-met hoxytetrahydrofuran-3-oxyl
cacaatatcgggtacaagaa

SEQ ID NO: 923 - RNA, 20 nt, synthetic construct
  source 1..20: mol_type = other RNA
  modified_base 1: mod_base = OTHER; note = 2'-O-methyl-guanosine with phosphorothioate linkage
  modified_base 2: mod_base = OTHER; note = 2'-O-methyl-guanosine with phosphorothioate linkage
  modified_base 3: mod_base = OTHER; note = 2'-O-methyl-guanosine
  modified_base 4: mod_base = OTHER; note = 2'-O-methyl-adenosine
  modified_base 5: mod_base = OTHER; note = 2'-O-methyl-adenosine
  modified_base 6: mod_base = OTHER; note = 2'-fluoro-uridine
  modified_base 7: mod_base = OTHER; note = 2'-O-methyl-adenosine
  modified_base 8: mod_base = OTHER; note = 2'-fluoro-cytidine
  modified_base 9: mod_base = OTHER; note = 2'-fluoro-adenosine
  modified_base 10: mod_base = OTHER; note = 2'-fluoro-adenosine
  modified_base 11: mod_base = OTHER; note = 2'-fluoro-adenosine
  modified_base 12: mod_base = OTHER; note = 2'-O-methyl-guanosine
  modified_base 13: mod_base = OTHER; note = 2'-O-methyl-adenosine
  modified_base 14: mod_base = OTHER; note = 2'-O-methyl-uridine
  modified_base 15: mod_base = OTHER; note = 2'-O-methyl-adenosine
  modified_base 16: mod_base = OTHER; note = 2'-O-methyl-guanosine
  modified_base 17: mod_base = OTHER; note = 2'-O-methyl-adenosine
  modified_base 18: mod_base = OTHER; note = 2'-O-methyl-uridine with phosphorothioate linkage
  modified_base 19: mod_base = OTHER; note = 2'-O-methyl-adenosine with phosphorothioate linkage
  modified_base 20: mod_base = OTHER; note = 2'-O-methyl-adenosine conjugated to 3 iterations of (2R,3R,4R,5S)-5-(3-(5-(((2R,3R,4R,5R,6R)- 3-acetamido-4,5-dihydroxy-6-(hydroxymethyl)tetrahydro-2H-py ran-2-yl)oxy)pentanamido)propyl)-2-((hydroxyl)methyl)-4-met hoxytetrahydrofuran-3-oxyl
gggaatacaaagatagataa

SEQ ID NO: 924 - RNA, 20 nt, synthetic construct
  source 1..20: mol_type = other RNA
  modified_base 1: mod_base = OTHER; note = 2'-O-methyl-cytidine with phosphorothioate linkage
  modified_base 2: mod_base = OTHER; note = 2'-O-methyl-uridine with phosphorothioate linkage
  modified_base 3: mod_base = OTHER; note = 2'-O-methyl-guanosine
  modified_base 4: mod_base = OTHER; note = 2'-O-methyl-cytidine
  modified_base 5: mod_base = OTHER; note = 2'-O-methyl-cytidine
  modified_base 6: mod_base = OTHER; note = 2'-fluoro-cytidine
  modified_base 7: mod_base = OTHER; note = 2'-O-methyl-uridine
  modified_base 8: mod_base = OTHER; note = 2'-fluoro-cytidine
  modified_base 9: mod_base = OTHER; note = 2'-fluoro-adenosine
  modified_base 10: mod_base = OTHER; note = 2'-fluoro-guanosine
  modified_base 11: mod_base = OTHER; note = 2'-fluoro-guanosine
  modified_base 12: mod_base = OTHER; note = 2'-O-methyl-guanosine
  modified_base 13: mod_base = OTHER; note = 2'-O-methyl-adenosine
  modified_base 14: mod_base = OTHER; note = 2'-O-methyl-uridine
  modified_base 15: mod_base = OTHER; note = 2'-O-methyl-uridine
  modified_base 16: mod_base = OTHER; note = 2'-O-methyl-uridine
  modified_base 17: mod_base = OTHER; note = 2'-O-methyl-uridine
  modified_base 18: mod_base = OTHER; note = 2'-O-methyl-adenosine with phosphorothioate linkage
  modified_base 19: mod_base = OTHER; note = 2'-O-methyl-adenosine with phosphorothioate linkage
  modified_base 20: mod_base = OTHER; note = 2'-O-methyl-adenosine conjugated to 3 iterations of (2R,3R,4R,5S)-5-(3-(5-(((2R,3R,4R,5R,6R)- 3-acetamido-4,5-dihydroxy-6-(hydroxymethyl)tetrahydro-2H-py ran-2-yl)oxy)pentanamido)propyl)-2-((hydroxyl)methyl)-4-met hoxytetrahydrofuran-3-oxyl
ctgccctcagggattttaaa

SEQ ID NO: 925 - RNA, 20 nt, synthetic construct
  source 1..20: mol_type = other RNA
  modified_base 1: mod_base = OTHER; note = 2'-O-methyl-cytidine with phosphorothioate linkage
  modified_base 2: mod_base = OTHER; note = 2'-O-methyl-uridine with phosphorothioate linkage
  modified_base 3: mod_base = OTHER; note = 2'-O-methyl-adenosine
  modified_base 4: mod_base = OTHER; note = 2'-O-methyl-guanosine
  modified_base 5: mod_base = OTHER; note = 2'-O-methyl-guanosine
  modified_base 6: mod_base = OTHER; note = 2'-fluoro-adenosine
  modified_base 7: mod_base = OTHER; note = 2'-O-methyl-uridine
  modified_base 8: mod_base = OTHER; note = 2'-fluoro-adenosine
  modified_base 9: mod_base = OTHER; note = 2'-fluoro-guanosine
  modified_base 10: mod_base = OTHER; note = 2'-fluoro-guanosine
  modified_base 11: mod_base = OTHER; note = 2'-fluoro-uridine
  modified_base 12: mod_base = OTHER; note = 2'-O-methyl-cytidine
  modified_base 13: mod_base = OTHER; note = 2'-O-methyl-uridine
  modified_base 14: mod_base = OTHER; note = 2'-O-methyl-guanosine
  modified_base 15: mod_base = OTHER; note = 2'-O-methyl-adenosine
  modified_base 16: mod_base = OTHER; note = 2'-O-methyl-adenosine
  modified_base 17: mod_base = OTHER; note = 2'-O-methyl-adenosine
  modified_base 18: mod_base = OTHER; note = 2'-O-methyl-adenosine with phosphorothioate linkage
  modified_base 19: mod_base = OTHER; note = 2'-O-methyl-uridine with phosphorothioate linkage
  modified_base 20: mod_base = OTHER; note = 2'-O-methyl-adenosine conjugated to 3 iterations of (2R,3R,4R,5S)-5-(3-(5-(((2R,3R,4R,5R,6R)- 3-acetamido-4,5-dihydroxy-6-(hydroxymethyl)tetrahydro-2H-py ran-2-yl)oxy)pentanamido)propyl)-2-((hydroxyl)methyl)-4-met hoxytetrahydrofuran-3-oxyl
ctaggataggtctgaaaata

SEQ ID NO: 926 - RNA, 20 nt, synthetic construct
  source 1..20: mol_type = other RNA
  modified_base 1: mod_base = OTHER; note = 2'-O-methyl-guanosine with phosphorothioate linkage
  modified_base 2: mod_base = OTHER; note = 2'-O-methyl-adenosine with phosphorothioate linkage
  modified_base 3: mod_base = OTHER; note = 2'-O-methyl-adenosine
  modified_base 4: mod_base = OTHER; note = 2'-O-methyl-adenosine
  modified_base 5: mod_base = OTHER; note = 2'-O-methyl-guanosine
  modified_base 6: mod_base = OTHER; note = 2'-fluoro-uridine
  modified_base 7: mod_base = OTHER; note = 2'-O-methyl-adenosine
  modified_base 8: mod_base = OTHER; note = 2'-fluoro-guanosine
  modified_base 9: mod_base = OTHER; note = 2'-fluoro-cytidine
  modified_base 10: mod_base = OTHER; note = 2'-fluoro-uridine
  modified_base 11: mod_base = OTHER; note = 2'-fluoro-uridine
  modified_base 12: mod_base = OTHER; note = 2'-O-methyl-uridine
  modified_base 13: mod_base = OTHER; note = 2'-O-methyl-adenosine
  modified_base 14: mod_base = OTHER; note = 2'-O-methyl-uridine
  modified_base 15: mod_base = OTHER; note = 2'-O-methyl-uridine
  modified_base 16: mod_base = OTHER; note = 2'-O-methyl-uridine
  modified_base 17: mod_base = OTHER; note = 2'-O-methyl-guanosine
  modified_base 18: mod_base = OTHER; note = 2'-O-methyl-guanosine with phosphorothioate linkage
  modified_base 19: mod_base = OTHER; note = 2'-O-methyl-adenosine with phosphorothioate linkage
  modified_base 20: mod_base = OTHER; note = 2'-O-methyl-adenosine conjugated to 3 iterations of (2R,3R,4R,5S)-5-(3-(5-(((2R,3R,4R,5R,6R)- 3-acetamido-4,5-dihydroxy-6-(hydroxymethyl)tetrahydro-2H-py ran-2-yl)oxy)pentanamido)propyl)-2-((hydroxyl)methyl)-4-met hoxytetrahydrofuran-3-oxyl
gaaagtagctttatttggaa

SEQ ID NO: 927 - RNA, 20 nt, synthetic construct
  source 1..20: mol_type = other RNA
  modified_base 1: mod_base = OTHER; note = 2'-O-methyl-guanosine with phosphorothioate linkage
  modified_base 2: mod_base = OTHER; note = 2'-O-methyl-guanosine with phosphorothioate linkage
  modified_base 3: mod_base = OTHER; note = 2'-O-methyl-adenosine
  modified_base 4: mod_base = OTHER; note = 2'-O-methyl-uridine
  modified_base 5: mod_base = OTHER; note = 2'-O-methyl-adenosine
  modified_base 6: mod_base = OTHER; note = 2'-fluoro-uridine
  modified_base 7: mod_base = OTHER; note = 2'-O-methyl-uridine
  modified_base 8: mod_base = OTHER; note = 2'-fluoro-adenosine
  modified_base 9: mod_base = OTHER; note = 2'-fluoro-cytidine
  modified_base 10: mod_base = OTHER; note = 2'-fluoro-adenosine
  modified_base 11: mod_base = OTHER; note = 2'-fluoro-guanosine
  modified_base 12: mod_base = OTHER; note = 2'-O-methyl-adenosine
  modified_base 13: mod_base = OTHER; note = 2'-O-methyl-cytidine
  modified_base 14: mod_base = OTHER; note = 2'-O-methyl-adenosine
  modified_base 15: mod_base = OTHER; note = 2'-O-methyl-adenosine
  modified_base 16: mod_base = OTHER; note = 2'-O-methyl-uridine
  modified_base 17: mod_base = OTHER; note = 2'-O-methyl-cytidine
  modified_base 18: mod_base = OTHER; note = 2'-O-methyl-uridine with phosphorothioate linkage
  modified_base 19: mod_base = OTHER; note = 2'-O-methyl-adenosine with phosphorothioate linkage
  modified_base 20: mod_base = OTHER; note = 2'-O-methyl-adenosine conjugated to 3 iterations of (2R,3R,4R,5S)-5-(3-(5-(((2R,3R,4R,5R,6R)- 3-acetamido-4,5-dihydroxy-6-(hydroxymethyl)tetrahydro-2H-py ran-2-yl)oxy)pentanamido)propyl)-2-((hydroxyl)methyl)-4-met hoxytetrahydrofuran-3-oxyl
ggatattacagacaatctaa

SEQ ID NO: 928 - RNA, 20 nt, synthetic construct
  source 1..20: mol_type = other RNA
  modified_base 1: mod_base = OTHER; note = 2'-O-methyl-guanosine with phosphorothioate linkage
  modified_base 2: mod_base = OTHER; note = 2'-O-methyl-uridine with phosphorothioate linkage
  modified_base 3: mod_base = OTHER; note = 2'-O-methyl-guanosine
  modified_base 4: mod_base = OTHER; note = 2'-O-methyl-cytidine
  modified_base 5: mod_base = OTHER; note = 2'-O-methyl-cytidine
  modified_base 6: mod_base = OTHER; note = 2'-fluoro-uridine
  modified_base 7: mod_base = OTHER; note = 2'-O-methyl-cytidine
  modified_base 8: mod_base = OTHER; note = 2'-fluoro-adenosine
  modified_base 9: mod_base = OTHER; note = 2'-fluoro-adenosine
  modified_base 10: mod_base = OTHER; note = 2'-fluoro-adenosine
  modified_base 11: mod_base = OTHER; note = 2'-fluoro-uridine
  modified_base 12: mod_base = OTHER; note = 2'-O-methyl-adenosine
  modified_base 13: mod_base = OTHER; note = 2'-O-methyl-adenosine
  modified_base 14: mod_base = OTHER; note = 2'-O-methyl-adenosine
  modified_base 15: mod_base = OTHER; note = 2'-O-methyl-cytidine
  modified_base 16: mod_base = OTHER; note = 2'-O-methyl-adenosine
  modified_base 17: mod_base = OTHER; note = 2'-O-methyl-adenosine
  modified_base 18: mod_base = OTHER; note = 2'-O-methyl-guanosine with phosphorothioate linkage
  modified_base 19: mod_base = OTHER; note = 2'-O-methyl-adenosine with phosphorothioate linkage
  modified_base 20: mod_base = OTHER; note = 2'-O-methyl-adenosine conjugated to 3 iterations of (2R,3R,4R,5S)-5-(3-(5-(((2R,3R,4R,5R,6R)- 3-acetamido-4,5-dihydroxy-6-(hydroxymethyl)tetrahydro-2H-py ran-2-yl)oxy)pentanamido)propyl)-2-((hydroxyl)methyl)-4-met hoxytetrahydrofuran-3-oxyl
gtgcctcaaataaacaagaa

SEQ ID NO: 929 - RNA, 20 nt, synthetic construct
  source 1..20: mol_type = other RNA
  modified_base 1: mod_base = OTHER; note = 2'-O-methyl-guanosine with phosphorothioate linkage
  modified_base 2: mod_base = OTHER; note = 2'-O-methyl-cytidine with phosphorothioate linkage
  modified_base 3: mod_base = OTHER; note = 2'-O-methyl-cytidine
  modified_base 4: mod_base = OTHER; note = 2'-O-methyl-uridine
  modified_base 5: mod_base = OTHER; note = 2'-O-methyl-cytidine
  modified_base 6: mod_base = OTHER; note = 2'-fluoro-adenosine
  modified_base 7: mod_base = OTHER; note = 2'-O-methyl-adenosine
  modified_base 8: mod_base = OTHER; note = 2'-fluoro-adenosine
  modified_base 9: mod_base = OTHER; note = 2'-fluoro-uridine
  modified_base 10: mod_base = OTHER; note = 2'-fluoro-adenosine
  modified_base 11: mod_base = OTHER; note = 2'-fluoro-adenosine
  modified_base 12: mod_base = OTHER; note = 2'-O-methyl-adenosine
  modified_base 13: mod_base = OTHER; note = 2'-O-methyl-cytidine
  modified_base 14: mod_base = OTHER; note = 2'-O-methyl-adenosine
  modified_base 15: mod_base = OTHER; note = 2'-O-methyl-adenosine
  modified_base 16: mod_base = OTHER; note = 2'-O-methyl-guanosine
  modified_base 17: mod_base = OTHER; note = 2'-O-methyl-adenosine
  modified_base 18: mod_base = OTHER; note = 2'-O-methyl-adenosine with phosphorothioate linkage
  modified_base 19: mod_base = OTHER; note = 2'-O-methyl-uridine with phosphorothioate linkage
  modified_base 20: mod_base = OTHER; note = 2'-O-methyl-adenosine conjugated to 3 iterations of (2R,3R,4R,5S)-5-(3-(5-(((2R,3R,4R,5R,6R)- 3-acetamido-4,5-dihydroxy-6-(hydroxymethyl)tetrahydro-2H-py ran-2-yl)oxy)pentanamido)propyl)-2-((hydroxyl)methyl)-4-met hoxytetrahydrofuran-3-oxyl
gcctcaaataaacaagaata

SEQ ID NO: 930 - RNA, 20 nt, synthetic construct
  source 1..20: mol_type = other RNA
  modified_base 1: mod_base = OTHER; note = 2'-O-methyl-cytidine with phosphorothioate linkage
  modified_base 2: mod_base = OTHER; note = 2'-O-methyl-uridine with phosphorothioate linkage
  modified_base 3: mod_base = OTHER; note = 2'-O-methyl-uridine
  modified_base 4: mod_base = OTHER; note = 2'-O-methyl-adenosine
  modified_base 5: mod_base = OTHER; note = 2'-O-methyl-uridine
  modified_base 6: mod_base = OTHER; note = 2'-fluoro-uridine
  modified_base 7: mod_base = OTHER; note = 2'-O-methyl-uridine
  modified_base 8: mod_base = OTHER; note = 2'-fluoro-guanosine
  modified_base 9: mod_base = OTHER; note = 2'-fluoro-adenosine
  modified_base 10: mod_base = OTHER; note = 2'-fluoro-guanosine
  modified_base 11: mod_base = OTHER; note = 2'-fluoro-guanosine
  modified_base 12: mod_base = OTHER; note = 2'-O-methyl-guanosine
  modified_base 13: mod_base = OTHER; note = 2'-O-methyl-uridine
  modified_base 14: mod_base = OTHER; note = 2'-O-methyl-guanosine
  modified_base 15: mod_base = OTHER; note = 2'-O-methyl-uridine
  modified_base 16: mod_base = OTHER; note = 2'-O-methyl-cytidine
  modified_base 17: mod_base = OTHER; note = 2'-O-methyl-uridine
  modified_base 18: mod_base = OTHER; note = 2'-O-methyl-adenosine with phosphorothioate linkage
  modified_base 19: mod_base = OTHER; note = 2'-O-methyl-adenosine with phosphorothioate linkage
  modified_base 20: mod_base = OTHER; note = 2'-O-methyl-adenosine conjugated to 3 iterations of (2R,3R,4R,5S)-5-(3-(5-(((2R,3R,4R,5R,6R)- 3-acetamido-4,5-dihydroxy-6-(hydroxymethyl)tetrahydro-2H-py ran-2-yl)oxy)pentanamido)propyl)-2-((hydroxyl)methyl)-4-met hoxytetrahydrofuran-3-oxyl
cttatttgagggtgtctaaa

SEQ ID NO: 931 - RNA, 20 nt, synthetic construct
  source 1..20: mol_type = other RNA
  modified_base 1: mod_base = OTHER; note = 2'-O-methyl-cytidine with phosphorothioate linkage
  modified_base 2: mod_base = OTHER; note = 2'-O-methyl-uridine with phosphorothioate linkage
  modified_base 3: mod_base = OTHER; note = 2'-O-methyl-guanosine
  modified_base 4: mod_base = OTHER; note = 2'-O-methyl-adenosine
  modified_base 5: mod_base = OTHER; note = 2'-O-methyl-adenosine
  modified_base 6: mod_base = OTHER; note = 2'-fluoro-guanosine
  modified_base 7: mod_base = OTHER; note = 2'-O-methyl-adenosine
  modified_base 8: mod_base = OTHER; note = 2'-fluoro-adenosine
  modified_base 9: mod_base = OTHER; note = 2'-fluoro-adenosine
  modified_base 10: mod_base = OTHER; note = 2'-fluoro-uridine
  modified_base 11: mod_base = OTHER; note = 2'-fluoro-cytidine
  modified_base 12: mod_base = OTHER; note = 2'-O-methyl-cytidine
  modified_base 13: mod_base = OTHER; note = 2'-O-methyl-guanosine
  modified_base 14: mod_base = OTHER; note = 2'-O-methyl-uridine
  modified_base 15: mod_base = OTHER; note = 2'-O-methyl-adenosine
  modified_base 16: mod_base = OTHER; note = 2'-O-methyl-uridine
  modified_base 17: mod_base = OTHER; note = 2'-O-methyl-guanosine
  modified_base 18: mod_base = OTHER; note = 2'-O-methyl-uridine with phosphorothioate linkage
  modified_base 19: mod_base = OTHER; note = 2'-O-methyl-uridine with phosphorothioate linkage
  modified_base 20: mod_base = OTHER; note = 2'-O-methyl-adenosine conjugated to 3 iterations of (2R,3R,4R,5S)-5-(3-(5-(((2R,3R,4R,5R,6R)- 3-acetamido-4,5-dihydroxy-6-(hydroxymethyl)tetrahydro-2H-py ran-2-yl)oxy)pentanamido)propyl)-2-((hydroxyl)methyl)-4-met hoxytetrahydrofuran-3-oxyl
ctgaagaaatccgtatgtta

SEQ ID NO: 932 - RNA, 20 nt, synthetic construct
  source 1..20: mol_type = other RNA
  modified_base 1: mod_base = OTHER; note = 2'-O-methyl-cytidine with phosphorothioate linkage
  modified_base 2: mod_base = OTHER; note = 2'-O-methyl-cytidine with phosphorothioate linkage
  modified_base 3: mod_base = OTHER; note = 2'-O-methyl-guanosine
  modified_base 4: mod_base = OTHER; note = 2'-O-methyl-uridine
  modified_base 5: mod_base = OTHER; note = 2'-O-methyl-adenosine
  modified_base 6: mod_base = OTHER; note = 2'-fluoro-uridine
  modified_base 7: mod_base = OTHER; note = 2'-O-methyl-guanosine
  modified_base 8: mod_base = OTHER; note = 2'-fluoro-uridine
  modified_base 9: mod_base = OTHER; note = 2'-fluoro-uridine
  modified_base 10: mod_base = OTHER; note = 2'-fluoro-adenosine
  modified_base 11: mod_base = OTHER; note = 2'-fluoro-guanosine
  modified_base 12: mod_base = OTHER; note = 2'-O-methyl-uridine
  modified_base 13: mod_base = OTHER; note = 2'-O-methyl-adenosine
  modified_base 14: mod_base = OTHER; note = 2'-O-methyl-cytidine
  modified_base 15: mod_base = OTHER; note = 2'-O-methyl-adenosine
  modified_base 16: mod_base = OTHER; note = 2'-O-methyl-uridine
  modified_base 17: mod_base = OTHER; note = 2'-O-methyl-uridine
  modified_base 18: mod_base = OTHER; note = 2'-O-methyl-uridine with phosphorothioate linkage
  modified_base 19: mod_base = OTHER; note = 2'-O-methyl-uridine with phosphorothioate linkage
  modified_base 20: mod_base = OTHER; note = 2'-O-methyl-adenosine conjugated to 3 iterations of (2R,3R,4R,5S)-5-(3-(5-(((2R,3R,4R,5R,6R)- 3-acetamido-4,5-dihydroxy-6-(hydroxymethyl)tetrahydro-2H-py ran-2-yl)oxy)pentanamido)propyl)-2-((hydroxyl)methyl)-4-met hoxytetrahydrofuran-3-oxyl
ccgtatgttagtacatttta

SEQ ID NO: 933 - RNA, 20 nt, synthetic construct
  source 1..20: mol_type = other RNA
  modified_base 1: mod_base = OTHER; note = 2'-O-methyl-cytidine with phosphorothioate linkage
  modified_base 2: mod_base = OTHER; note = 2'-O-methyl-adenosine with phosphorothioate linkage
  modified_base 3: mod_base = OTHER; note = 2'-O-methyl-uridine
  modified_base 4: mod_base = OTHER; note = 2'-O-methyl-adenosine
  modified_base 5: mod_base = OTHER; note = 2'-O-methyl-adenosine
  modified_base 6: mod_base = OTHER; note = 2'-fluoro-guanosine
  modified_base 7: mod_base = OTHER; note = 2'-O-methyl-guanosine
  modified_base 8: mod_base = OTHER; note = 2'-fluoro-cytidine
  modified_base 9: mod_base = OTHER; note = 2'-fluoro-adenosine
  modified_base 10: mod_base = OTHER; note = 2'-fluoro-guanosine
  modified_base 11: mod_base = OTHER; note = 2'-fluoro-guanosine
  modified_base 12: mod_base = OTHER; note = 2'-O-methyl-cytidine
  modified_base 13: mod_base = OTHER; note = 2'-O-methyl-uridine
  modified_base 14: mod_base = OTHER; note = 2'-O-methyl-uridine
  modified_base 15: mod_base = OTHER; note = 2'-O-methyl-cytidine
  modified_base 16: mod_base = OTHER; note = 2'-O-methyl-uridine
  modified_base 17: mod_base = OTHER; note = 2'-O-methyl-uridine
  modified_base 18: mod_base = OTHER; note = 2'-O-methyl-guanosine with phosphorothioate linkage
  modified_base 19: mod_base = OTHER; note = 2'-O-methyl-uridine with phosphorothioate linkage
  modified_base 20: mod_base = OTHER; note = 2'-O-methyl-adenosine conjugated to 3 iterations of (2R,3R,4R,5S)-5-(3-(5-(((2R,3R,4R,5R,6R)- 3-acetamido-4,5-dihydroxy-6-(hydroxymethyl)tetrahydro-2H-py ran-2-yl)oxy)pentanamido)propyl)-2-((hydroxyl)methyl)-4-met hoxytetrahydrofuran-3-oxyl
cataaggcaggcttcttgta

SEQ ID NO: 934 - RNA, 20 nt, synthetic construct
  source 1..20: mol_type = other RNA
  modified_base 1: mod_base = OTHER; note = 2'-O-methyl-cytidine with phosphorothioate linkage
  modified_base 2: mod_base = OTHER; note = 2'-O-methyl-uridine with phosphorothioate linkage
  modified_base 3: mod_base = OTHER; note = 2'-O-methyl-uridine
  modified_base 4: mod_base = OTHER; note = 2'-O-methyl-adenosine
  modified_base 5: mod_base = OTHER; note = 2'-O-methyl-uridine
  modified_base 6: mod_base = OTHER; note = 2'-fluoro-guanosine
  modified_base 7: mod_base = OTHER; note = 2'-O-methyl-cytidine
  modified_base 8: mod_base = OTHER; note = 2'-fluoro-uridine
  modified_base 9: mod_base = OTHER; note = 2'-fluoro-guanosine
  modified_base 10: mod_base = OTHER; note = 2'-fluoro-uridine
  modified_base 11: mod_base = OTHER; note = 2'-fluoro-cytidine
  modified_base 12: mod_base = OTHER; note = 2'-O-methyl-adenosine
  modified_base 13: mod_base = OTHER; note = 2'-O-methyl-adenosine
  modified_base 14: mod_base = OTHER; note = 2'-O-methyl-adenosine
  modified_base 15: mod_base = OTHER; note = 2'-O-methyl-uridine
  modified_base 16: mod_base = OTHER; note = 2'-O-methyl-guanosine
  modified_base 17: mod_base = OTHER; note = 2'-O-methyl-uridine
  modified_base 18: mod_base = OTHER; note = 2'-O-methyl-uridine with phosphorothioate linkage
  modified_base 19: mod_base = OTHER; note = 2'-O-methyl-adenosine with phosphorothioate linkage
  modified_base 20: mod_base = OTHER; note = 2'-O-methyl-adenosine conjugated to 3 iterations of (2R,3R,4R,5S)-5-(3-(5-(((2R,3R,4R,5R,6R)- 3-acetamido-4,5-dihydroxy-6-(hydroxymethyl)tetrahydro-2H-py ran-2-yl)oxy)pentanamido)propyl)-2-((hydroxyl)methyl)-4-met hoxytetrahydrofuran-3-oxyl
cttatgctgtcaaatgttaa

SEQ ID NO: 935 - RNA, 20 nt, synthetic construct
  source 1..20: mol_type = other RNA
  modified_base 1: mod_base = OTHER; note = 2'-O-methyl-cytidine with phosphorothioate linkage
  modified_base 2: mod_base = OTHER; note = 2'-O-methyl-adenosine with phosphorothioate linkage
  modified_base 3: mod_base = OTHER; note = 2'-O-methyl-guanosine
  modified_base 4: mod_base = OTHER; note = 2'-O-methyl-uridine
  modified_base 5: mod_base = OTHER; note = 2'-O-methyl-adenosine
  modified_base 6: mod_base = OTHER; note = 2'-fluoro-uridine
  modified_base 7: mod_base = OTHER; note = 2'-O-methyl-uridine
  modified_base 8: mod_base = OTHER; note = 2'-fluoro-uridine
  modified_base 9: mod_base = OTHER; note = 2'-fluoro-cytidine
  modified_base 10: mod_base = OTHER; note = 2'-fluoro-adenosine
  modified_base 11: mod_base = OTHER; note = 2'-fluoro-guanosine
  modified_base 12: mod_base = OTHER; note = 2'-O-methyl-cytidine
  modified_base 13: mod_base = OTHER; note = 2'-O-methyl-adenosine
  modified_base 14: mod_base = OTHER; note = 2'-O-methyl-uridine
  modified_base 15: mod_base = OTHER; note = 2'-O-methyl-guanosine
  modified_base 16: mod_base = OTHER; note = 2'-O-methyl-adenosine
  modified_base 17: mod_base = OTHER; note = 2'-O-methyl-adenosine
  modified_base 18: mod_base = OTHER; note = 2'-O-methyl-cytidine with phosphorothioate linkage
  modified_base 19: mod_base = OTHER; note = 2'-O-methyl-uridine with phosphorothioate linkage
  modified_base 20: mod_base = OTHER; note = 2'-O-methyl-adenosine conjugated to 3 iterations of (2R,3R,4R,5S)-5-(3-(5-(((2R,3R,4R,5R,6R)- 3-acetamido-4,5-dihydroxy-6-(hydroxymethyl)tetrahydro-2H-py ran-2-yl)oxy)pentanamido)propyl)-2-((hydroxyl)methyl)-4-met hoxytetrahydrofuran-3-oxyl
cagtatttcagcatgaacta

SEQ ID NO: 936 - RNA, 20 nt, synthetic construct
  source 1..20: mol_type = other RNA
  modified_base 1: mod_base = OTHER; note = 2'-O-methyl-cytidine with phosphorothioate linkage
  modified_base 2: mod_base = OTHER; note = 2'-O-methyl-adenosine with phosphorothioate linkage
  modified_base 3: mod_base = OTHER; note = 2'-O-methyl-guanosine
  modified_base 4: mod_base = OTHER; note = 2'-O-methyl-adenosine
  modified_base 5: mod_base = OTHER; note = 2'-O-methyl-uridine
  modified_base 6: mod_base = OTHER; note = 2'-fluoro-uridine
  modified_base 7: mod_base = OTHER; note = 2'-O-methyl-cytidine
  modified_base 8: mod_base = OTHER; note = 2'-fluoro-uridine
  modified_base 9: mod_base = OTHER; note = 2'-fluoro-guanosine
  modified_base 10: mod_base = OTHER; note = 2'-fluoro-uridine
  modified_base 11: mod_base = OTHER; note = 2'-fluoro-uridine
  modified_base 12: mod_base = OTHER; note = 2'-O-methyl-guanosine
  modified_base 13: mod_base = OTHER; note = 2'-O-methyl-uridine
  modified_base 14: mod_base = OTHER; note = 2'-O-methyl-adenosine
  modified_base 15: mod_base = OTHER; note = 2'-O-methyl-uridine
  modified_base 16: mod_base = OTHER; note = 2'-O-methyl-guanosine
  modified_base 17: mod_base = OTHER; note = 2'-O-methyl-cytidine
  modified_base 18: mod_base = OTHER; note = 2'-O-methyl-uridine with phosphorothioate linkage
  modified_base 19: mod_base = OTHER; note = 2'-O-methyl-uridine with phosphorothioate linkage
  modified_base 20: mod_base = OTHER; note = 2'-O-methyl-adenosine conjugated to 3 iterations of (2R,3R,4R,5S)-5-(3-(5-(((2R,3R,4R,5R,6R)- 3-acetamido-4,5-dihydroxy-6-(hydroxymethyl)tetrahydro-2H-py ran-2-yl)oxy)pentanamido)propyl)-2-((hydroxyl)methyl)-4-met hoxytetrahydrofuran-3-oxyl
cagattctgttgtatgctta

SEQ ID NO: 937 - RNA, 20 nt, synthetic construct
  source 1..20: mol_type = other RNA
  modified_base 1: mod_base = OTHER; note = 2'-O-methyl-cytidine with phosphorothioate linkage
  modified_base 2: mod_base = OTHER; note = 2'-O-methyl-uridine with phosphorothioate linkage
  modified_base 3: mod_base = OTHER; note = 2'-O-methyl-guanosine
  modified_base 4: mod_base = OTHER; note = 2'-O-methyl-uridine
  modified_base 5: mod_base = OTHER; note = 2'-O-methyl-uridine
  modified_base 6: mod_base = OTHER; note = 2'-fluoro-guanosine
  modified_base 7: mod_base = OTHER; note = 2'-O-methyl-uridine
  modified_base 8: mod_base = OTHER; note = 2'-fluoro-adenosine
  modified_base 9: mod_base = OTHER; note = 2'-fluoro-uridine
  modified_base 10: mod_base = OTHER; note = 2'-fluoro-guanosine
  modified_base 11: mod_base = OTHER; note = 2'-fluoro-cytidine
  modified_base 12: mod_base = OTHER; note = 2'-O-methyl-uridine
  modified_base 13: mod_base = OTHER; note = 2'-O-methyl-uridine
  modified_base 14: mod_base = OTHER; note = 2'-O-methyl-uridine
  modified_base 15: mod_base = OTHER; note = 2'-O-methyl-cytidine
  modified_base 16: mod_base = OTHER; note = 2'-O-methyl-uridine
  modified_base 17: mod_base = OTHER; note = 2'-O-methyl-uridine
  modified_base 18: mod_base = OTHER; note = 2'-O-methyl-cytidine with phosphorothioate linkage
  modified_base 19: mod_base = OTHER; note = 2'-O-methyl-uridine with phosphorothioate linkage
  modified_base 20: mod_base = OTHER; note = 2'-O-methyl-adenosine conjugated to 3 iterations of (2R,3R,4R,5S)-5-(3-(5-(((2R,3R,4R,5R,6R)- 3-acetamido-4,5-dihydroxy-6-(hydroxymethyl)tetrahydro-2H-py ran-2-yl)oxy)pentanamido)propyl)-2-((hydroxyl)methyl)-4-met hoxytetrahydrofuran-3-oxyl
ctgttgtatgctttcttcta

SEQ ID NO: 938 - RNA, 20 nt, synthetic construct
  source 1..20: mol_type = other RNA
  modified_base 1: mod_base = OTHER; note = 2'-O-methyl-guanosine with phosphorothioate linkage
  modified_base 2: mod_base = OTHER; note = 2'-O-methyl-uridine with phosphorothioate linkage
  modified_base 3: mod_base = OTHER; note = 2'-O-methyl-uridine
  modified_base 4: mod_base = OTHER; note = 2'-O-methyl-guanosine
  modified_base 5: mod_base = OTHER; note = 2'-O-methyl-uridine
  modified_base 6: mod_base = OTHER; note = 2'-fluoro-adenosine
  modified_base 7: mod_base = OTHER; note = 2'-O-methyl-uridine
  modified_base 8: mod_base = OTHER; note = 2'-fluoro-guanosine
  modified_base 9: mod_base = OTHER; note = 2'-fluoro-cytidine
  modified_base 10: mod_base = OTHER; note = 2'-fluoro-uridine
  modified_base 11: mod_base = OTHER; note = 2'-fluoro-uridine
  modified_base 12: mod_base = OTHER; note = 2'-O-methyl-uridine
  modified_base 13: mod_base = OTHER; note = 2'-O-methyl-cytidine
  modified_base 14: mod_base = OTHER; note = 2'-O-methyl-uridine
  modified_base 15: mod_base = OTHER; note = 2'-O-methyl-uridine
  modified_base 16: mod_base = OTHER; note = 2'-O-methyl-cytidine
  modified_base 17: mod_base = OTHER; note = 2'-O-methyl-uridine
  modified_base 18: mod_base = OTHER; note = 2'-O-methyl-adenosine with phosphorothioate linkage
  modified_base 19: mod_base = OTHER; note = 2'-O-methyl-uridine with phosphorothioate linkage
  modified_base 20: mod_base = OTHER; note = 2'-O-methyl-adenosine conjugated to 3 iterations of (2R,3R,4R,5S)-5-(3-(5-(((2R,3R,4R,5R,6R)- 3-acetamido-4,5-dihydroxy-6-(hydroxymethyl)tetrahydro-2H-py ran-2-yl)oxy)pentanamido)propyl)-2-((hydroxyl)methyl)-4-met hoxytetrahydrofuran-3-oxyl
gttgtatgctttcttctata

SEQ ID NO: 939 - RNA, 20 nt, synthetic construct
  source 1..20: mol_type = other RNA
  modified_base 1: mod_base = OTHER; note = 2'-O-methyl-guanosine with phosphorothioate linkage
  modified_base 2: mod_base = OTHER; note = 2'-O-methyl-adenosine with phosphorothioate linkage
  modified_base 3: mod_base = OTHER; note = 2'-O-methyl-cytidine
  modified_base 4: mod_base = OTHER; note = 2'-O-methyl-uridine
  modified_base 5: mod_base = OTHER; note = 2'-O-methyl-uridine
  modified_base 6: mod_base = OTHER; note = 2'-fluoro-guanosine
  modified_base 7: mod_base = OTHER; note = 2'-O-methyl-adenosine
  modified_base 8: mod_base = OTHER; note = 2'-fluoro-guanosine
  modified_base 9: mod_base = OTHER; note = 2'-fluoro-adenosine
  modified_base 10: mod_base = OTHER; note = 2'-fluoro-guanosine
  modified_base 11: mod_base = OTHER; note = 2'-fluoro-uridine
  modified_base 12: mod_base = OTHER; note = 2'-O-methyl-uridine
  modified_base 13: mod_base = OTHER; note = 2'-O-methyl-adenosine
  modified_base 14: mod_base = OTHER; note = 2'-O-methyl-adenosine
  modified_base 15: mod_base = OTHER; note = 2'-O-methyl-guanosine
  modified_base 16: mod_base = OTHER; note = 2'-O-methyl-uridine
  modified_base 17: mod_base = OTHER; note = 2'-O-methyl-guanosine
  modified_base 18: mod_base = OTHER; note = 2'-O-methyl-adenosine with phosphorothioate linkage
  modified_base 19: mod_base = OTHER; note = 2'-O-methyl-adenosine with phosphorothioate linkage
  modified_base 20: mod_base = OTHER; note = 2'-O-methyl-adenosine conjugated to 3 iterations of (2R,3R,4R,5S)-5-(3-(5-(((2R,3R,4R,5R,6R)- 3-acetamido-4,5-dihydroxy-6-(hydroxymethyl)tetrahydro-2H-py ran-2-yl)oxy)pentanamido)propyl)-2-((hydroxyl)methyl)-4-met hoxytetrahydrofuran-3-oxyl
gacttgagagttaagtgaaa

SEQ ID NO: 940 - RNA, 20 nt, synthetic construct
  source 1..20: mol_type = other RNA
  modified_base 1: mod_base = OTHER; note = 2'-O-methyl-guanosine with phosphorothioate linkage
  modified_base 2: mod_base = OTHER; note = 2'-O-methyl-adenosine with phosphorothioate linkage
  modified_base 3: mod_base = OTHER; note = 2'-O-methyl-cytidine
  modified_base 4: mod_base = OTHER; note = 2'-O-methyl-uridine
  modified_base 5: mod_base = OTHER; note = 2'-O-methyl-guanosine
  modified_base 6: mod_base = OTHER; note = 2'-fluoro-uridine
  modified_base 7: mod_base = OTHER; note = 2'-O-methyl-cytidine
  modified_base 8: mod_base = OTHER; note = 2'-fluoro-guanosine
  modified_base 9: mod_base = OTHER; note = 2'-fluoro-uridine
  modified_base 10: mod_base = OTHER; note = 2'-fluoro-guanosine
  modified_base 11: mod_base = OTHER; note = 2'-fluoro-cytidine
  modified_base 12: mod_base = OTHER; note = 2'-O-methyl-adenosine
  modified_base 13: mod_base = OTHER; note = 2'-O-methyl-cytidine
  modified_base 14: mod_base = OTHER; note = 2'-O-methyl-uridine
  modified_base 15: mod_base = OTHER; note = 2'-O-methyl-adenosine
  modified_base 16: mod_base = OTHER; note = 2'-O-methyl-uridine
  modified_base 17: mod_base = OTHER; note = 2'-O-methyl-uridine
  modified_base 18: mod_base = OTHER; note = 2'-O-methyl-uridine with phosphorothioate linkage
  modified_base 19: mod_base = OTHER; note = 2'-O-methyl-uridine with phosphorothioate linkage
  modified_base 20: mod_base = OTHER; note = 2'-O-methyl-adenosine conjugated to 3 iterations of (2R,3R,4R,5S)-5-(3-(5-(((2R,3R,4R,5R,6R)- 3-acetamido-4,5-dihydroxy-6-(hydroxymethyl)tetrahydro-2H-py ran-2-yl)oxy)pentanamido)propyl)-2-((hydroxyl)methyl)-4-met hoxytetrahydrofuran-3-oxyl
gactgtcgtgcactatttta

SEQ ID NO: 941 - RNA, 20 nt, synthetic construct
  source 1..20: mol_type = other RNA
  modified_base 1: mod_base = OTHER; note = 2'-O-methyl-guanosine with phosphorothioate linkage
  modified_base 2: mod_base = OTHER; note = 2'-O-methyl-cytidine with phosphorothioate linkage
  modified_base 3: mod_base = OTHER; note = 2'-O-methyl-adenosine
  modified_base 4: mod_base = OTHER; note = 2'-O-methyl-uridine
  modified_base 5: mod_base = OTHER; note = 2'-O-methyl-adenosine
  modified_base 6: mod_base = OTHER; note = 2'-fluoro-guanosine
  modified_base 7: mod_base = OTHER; note = 2'-O-methyl-cytidine
  modified_base 8: mod_base = OTHER; note = 2'-fluoro-adenosine
  modified_base 9: mod_base = OTHER; note = 2'-fluoro-cytidine
  modified_base 10: mod_base = OTHER; note = 2'-fluoro-uridine
  modified_base 11: mod_base = OTHER; note = 2'-fluoro-uridine
  modified_base 12: mod_base = OTHER; note = 2'-O-methyl-guanosine
  modified_base 13: mod_base = OTHER; note = 2'-O-methyl-cytidine
  modified_base 14: mod_base = OTHER; note = 2'-O-methyl-uridine
  modified_base 15: mod_base = OTHER; note = 2'-O-methyl-uridine
  modified_base 16: mod_base = OTHER; note = 2'-O-methyl-uridine
  modified_base 17: mod_base = OTHER; note = 2'-O-methyl-uridine
  modified_base 18: mod_base = OTHER; note = 2'-O-methyl-cytidine with phosphorothioate linkage
  modified_base 19: mod_base = OTHER; note = 2'-O-methyl-adenosine with phosphorothioate linkage
  modified_base 20: mod_base = OTHER; note = 2'-O-methyl-adenosine conjugated to 3 iterations of (2R,3R,4R,5S)-5-(3-(5-(((2R,3R,4R,5R,6R)- 3-acetamido-4,5-dihydroxy-6-(hydroxymethyl)tetrahydro-2H-py ran-2-yl)oxy)pentanamido)propyl)-2-((hydroxyl)methyl)-4-met hoxytetrahydrofuran-3-oxyl
gcatagcacttgcttttcaa

SEQ ID NO: 942 - RNA, 20 nt, synthetic construct
  source 1..20: mol_type = other RNA
  modified_base 1: mod_base = OTHER; note = 2'-O-methyl-guanosine with phosphorothioate linkage
  modified_base 2: mod_base = OTHER; note = 2'-O-methyl-adenosine with phosphorothioate linkage
  modified_base 3: mod_base = OTHER; note = 2'-O-methyl-uridine
  modified_base 4: mod_base = OTHER; note = 2'-O-methyl-uridine
  modified_base 5: mod_base = OTHER; note = 2'-O-methyl-cytidine
  modified_base 6: mod_base = OTHER; note = 2'-fluoro-adenosine
  modified_base 7: mod_base = OTHER; note = 2'-O-methyl-uridine
  modified_base 8: mod_base = OTHER; note = 2'-fluoro-uridine
  modified_base 9: mod_base = OTHER; note = 2'-fluoro-adenosine
  modified_base 10: mod_base = OTHER; note = 2'-fluoro-guanosine
  modified_base 11: mod_base = OTHER; note = 2'-fluoro-guanosine
  modified_base 12: mod_base = OTHER; note = 2'-O-methyl-uridine
  modified_base 13: mod_base = OTHER; note = 2'-O-methyl-uridine
  modified_base 14: mod_base = OTHER; note = 2'-O-methyl-adenosine
  modified_base 15: mod_base = OTHER; note = 2'-O-methyl-guanosine
  modified_base 16: mod_base = OTHER; note = 2'-O-methyl-adenosine
  modified_base 17: mod_base = OTHER; note = 2'-O-methyl-adenosine
  modified_base 18: mod_base = OTHER; note = 2'-O-methyl-guanosine with phosphorothioate linkage
  modified_base 19: mod_base = OTHER; note = 2'-O-methyl-uridine with phosphorothioate linkage
  modified_base 20: mod_base = OTHER; note = 2'-O-methyl-adenosine conjugated to 3 iterations of (2R,3R,4R,5S)-5-(3-(5-(((2R,3R,4R,5R,6R)- 3-acetamido-4,5-dihydroxy-6-(hydroxymethyl)tetrahydro-2H-py ran-2-yl)oxy)pentanamido)propyl)-2-((hydroxyl)methyl)-4-met hoxytetrahydrofuran-3-oxyl
gattcattaggttagaagta

SEQ ID NO: 943 - RNA, 20 nt, synthetic construct
  source 1..20: mol_type = other RNA
  modified_base 1: mod_base = OTHER; note = 2'-O-methyl-guanosine with phosphorothioate linkage
  modified_base 2: mod_base = OTHER; note = 2'-O-methyl-cytidine with phosphorothioate linkage
  modified_base 3: mod_base = OTHER; note = 2'-O-methyl-uridine
  modified_base 4: mod_base = OTHER; note = 2'-O-methyl-uridine
  modified_base 5: mod_base = OTHER; note = 2'-O-methyl-guanosine
  modified_base 6: mod_base = OTHER; note = 2'-fluoro-uridine
  modified_base 7: mod_base = OTHER; note = 2'-O-methyl-uridine
  modified_base 8: mod_base = OTHER; note = 2'-fluoro-adenosine
  modified_base 9: mod_base = OTHER; note = 2'-fluoro-guanosine
  modified_base 10: mod_base = OTHER; note = 2'-fluoro-guanosine
  modified_base 11: mod_base = OTHER; note = 2'-fluoro-guanosine
  modified_base 12: mod_base = OTHER; note = 2'-O-methyl-cytidine
  modified_base 13: mod_base = OTHER; note = 2'-O-methyl-adenosine
  modified_base 14: mod_base = OTHER; note = 2'-O-methyl-uridine
  modified_base 15: mod_base = OTHER; note = 2'-O-methyl-adenosine
  modified_base 16: mod_base = OTHER; note = 2'-O-methyl-guanosine
  modified_base 17: mod_base = OTHER; note = 2'-O-methyl-uridine
  modified_base 18: mod_base = OTHER; note = 2'-O-methyl-cytidine with phosphorothioate linkage
  modified_base 19: mod_base = OTHER; note = 2'-O-methyl-uridine with phosphorothioate linkage
  modified_base 20: mod_base = OTHER; note = 2'-O-methyl-adenosine conjugated to 3 iterations of (2R,3R,4R,5S)-5-(3-(5-(((2R,3R,4R,5R,6R)- 3-acetamido-4,5-dihydroxy-6-(hydroxymethyl)tetrahydro-2H-py ran-2-yl)oxy)pentanamido)propyl)-2-((hydroxyl)methyl)-4-met hoxytetrahydrofuran-3-oxyl
gcttgttagggcatagtcta

SEQ ID NO: 944 - RNA, 20 nt, synthetic construct
  source 1..20: mol_type = other RNA
  modified_base 1: mod_base = OTHER; note = 2'-O-methyl-cytidine with phosphorothioate linkage
  modified_base 2: mod_base = OTHER; note = 2'-O-methyl-uridine with phosphorothioate linkage
  modified_base 3: mod_base = OTHER; note = 2'-O-methyl-uridine
  modified_base 4: mod_base = OTHER; note = 2'-O-methyl-guanosine
  modified_base 5: mod_base = OTHER; note = 2'-O-methyl-uridine
  modified_base 6: mod_base = OTHER; note = 2'-fluoro-uridine
  modified_base 7: mod_base = OTHER; note = 2'-O-methyl-adenosine
  modified_base 8: mod_base = OTHER; note = 2'-fluoro-guanosine
  modified_base 9: mod_base = OTHER; note = 2'-fluoro-guanosine
  modified_base 10: mod_base = OTHER; note = 2'-fluoro-guanosine
  modified_base 11: mod_base = OTHER; note = 2'-fluoro-cytidine
  modified_base 12: mod_base = OTHER; note = 2'-O-methyl-adenosine
  modified_base 13: mod_base = OTHER; note = 2'-O-methyl-uridine
  modified_base 14: mod_base = OTHER; note = 2'-O-methyl-adenosine
  modified_base 15: mod_base = OTHER; note = 2'-O-methyl-guanosine
  modified_base 16: mod_base = OTHER; note = 2'-O-methyl-uridine
  modified_base 17: mod_base = OTHER; note = 2'-O-methyl-cytidine
  modified_base 18: mod_base = OTHER; note = 2'-O-methyl-uridine with phosphorothioate linkage
  modified_base 19: mod_base = OTHER; note = 2'-O-methyl-uridine with phosphorothioate linkage
  modified_base 20: mod_base = OTHER; note = 2'-O-methyl-adenosine conjugated to 3 iterations of (2R,3R,4R,5S)-5-(3-(5-(((2R,3R,4R,5R,6R)- 3-acetamido-4,5-dihydroxy-6-(hydroxymethyl)tetrahydro-2H-py ran-2-yl)oxy)pentanamido)propyl)-2-((hydroxyl)methyl)-4-met hoxytetrahydrofuran-3-oxyl
cttgttagggcatagtctta

SEQ ID NO: 945 - RNA, 20 nt, synthetic construct
  source 1..20: mol_type = other RNA
  modified_base 1: mod_base = OTHER; note = 2'-O-methyl-guanosine with phosphorothioate linkage
  modified_base 2: mod_base = OTHER; note = 2'-O-methyl-uridine with phosphorothioate linkage
  modified_base 3: mod_base = OTHER; note = 2'-O-methyl-uridine
  modified_base 4: mod_base = OTHER; note = 2'-O-methyl-adenosine
  modified_base 5: mod_base = OTHER; note = 2'-O-methyl-guanosine
  modified_base 6: mod_base = OTHER; note = 2'-fluoro-guanosine
  modified_base 7: mod_base = OTHER; note = 2'-O-methyl-guanosine
  modified_base 8: mod_base = OTHER; note = 2'-fluoro-cytidine
  modified_base 9: mod_base = OTHER; note = 2'-fluoro-adenosine
  modified_base 10: mod_base = OTHER; note = 2'-fluoro-uridine
  modified_base 11: mod_base = OTHER; note = 2'-fluoro-adenosine
  modified_base 12: mod_base = OTHER; note = 2'-O-methyl-guanosine
  modified_base 13: mod_base = OTHER; note = 2'-O-methyl-uridine
  modified_base 14: mod_base = OTHER; note = 2'-O-methyl-cytidine
  modified_base 15: mod_base = OTHER; note = 2'-O-methyl-uridine
  modified_base 16: mod_base = OTHER; note = 2'-O-methyl-uridine
  modified_base 17: mod_base = OTHER; note = 2'-O-methyl-uridine
  modified_base 18: mod_base = OTHER; note = 2'-O-methyl-guanosine with phosphorothioate linkage
  modified_base 19: mod_base = OTHER; note = 2'-O-methyl-adenosine with phosphorothioate linkage
  modified_base 20: mod_base = OTHER; note = 2'-O-methyl-adenosine conjugated to 3 iterations of (2R,3R,4R,5S)-5-(3-(5-(((2R,3R,4R,5R,6R)- 3-acetamido-4,5-dihydroxy-6-(hydroxymethyl)tetrahydro-2H-py ran-2-yl)oxy)pentanamido)propyl)-2-((hydroxyl)methyl)-4-met hoxytetrahydrofuran-3-oxyl
gttagggcatagtctttgaa

SEQ ID NO: 946 - RNA, 20 nt, synthetic construct
  source 1..20: mol_type = other RNA
  modified_base 1: mod_base = OTHER; note = 2'-O-methyl-guanosine with phosphorothioate linkage
  modified_base 2: mod_base = OTHER; note = 2'-O-methyl-guanosine with phosphorothioate linkage
  modified_base 3: mod_base = OTHER; note = 2'-O-methyl-cytidine
  modified_base 4: mod_base = OTHER; note = 2'-O-methyl-adenosine
  modified_base 5: mod_base = OTHER; note = 2'-O-methyl-uridine
  modified_base 6: mod_base = OTHER; note = 2'-fluoro-adenosine
  modified_base 7: mod_base = OTHER; note = 2'-O-methyl-guanosine
  modified_base 8: mod_base = OTHER; note = 2'-fluoro-uridine
  modified_base 9: mod_base = OTHER; note = 2'-fluoro-cytidine
  modified_base 10: mod_base = OTHER; note = 2'-fluoro-uridine
  modified_base 11: mod_base = OTHER; note = 2'-fluoro-uridine
  modified_base 12: mod_base = OTHER; note = 2'-O-methyl-uridine
  modified_base 13: mod_base = OTHER; note = 2'-O-methyl-guanosine
  modified_base 14: mod_base = OTHER; note = 2'-O-methyl-adenosine
  modified_base 15: mod_base = OTHER; note = 2'-O-methyl-uridine
  modified_base 16: mod_base = OTHER; note = 2'-O-methyl-uridine
  modified_base 17: mod_base = OTHER; note = 2'-O-methyl-guanosine
  modified_base 18: mod_base = OTHER; note = 2'-O-methyl-adenosine with phosphorothioate linkage
  modified_base 19: mod_base = OTHER; note = 2'-O-methyl-adenosine with phosphorothioate linkage
  modified_base 20: mod_base = OTHER; note = 2'-O-methyl-adenosine conjugated to 3 iterations of (2R,3R,4R,5S)-5-(3-(5-(((2R,3R,4R,5R,6R)- 3-acetamido-4,5-dihydroxy-6-(hydroxymethyl)tetrahydro-2H-py ran-2-yl)oxy)pentanamido)propyl)-2-((hydroxyl)methyl)-4-met hoxytetrahydrofuran-3-oxyl
ggcatagtctttgattgaaa

SEQ ID NO: 947 - RNA, 20 nt, synthetic construct
  source 1..20: mol_type = other RNA
  modified_base 1: mod_base = OTHER; note = 2'-O-methyl-cytidine with phosphorothioate linkage
  modified_base 2: mod_base = OTHER; note = 2'-O-methyl-uridine with phosphorothioate linkage
  modified_base 3: mod_base = OTHER; note = 2'-O-methyl-uridine
  modified_base 4: mod_base = OTHER; note = 2'-O-methyl-guanosine
  modified_base 5: mod_base = OTHER; note = 2'-O-methyl-adenosine
  modified_base 6: mod_base = OTHER; note = 2'-fluoro-guanosine
  modified_base 7: mod_base = OTHER; note = 2'-O-methyl-adenosine
  modified_base 8: mod_base = OTHER; note = 2'-fluoro-guanosine
  modified_base 9: mod_base = OTHER; note = 2'-fluoro-cytidine
  modified_base 10: mod_base = OTHER; note = 2'-fluoro-uridine
  modified_base 11: mod_base = OTHER; note = 2'-fluoro-guanosine
  modified_base 12: mod_base = OTHER; note = 2'-O-methyl-cytidine
  modified_base 13: mod_base = OTHER; note = 2'-O-methyl-uridine
  modified_base 14: mod_base = OTHER; note = 2'-O-methyl-uridine
  modified_base 15: mod_base = OTHER; note = 2'-O-methyl-cytidine
  modified_base 16: mod_base = OTHER; note = 2'-O-methyl-uridine
  modified_base 17: mod_base = OTHER; note = 2'-O-methyl-adenosine
  modified_base 18: mod_base = OTHER; note = 2'-O-methyl-adenosine with phosphorothioate linkage
  modified_base 19: mod_base = OTHER; note = 2'-O-methyl-adenosine with phosphorothioate linkage
  modified_base 20: mod_base = OTHER; note = 2'-O-methyl-adenosine conjugated to 3 iterations of (2R,3R,4R,5S)-5-(3-(5-(((2R,3R,4R,5R,6R)- 3-acetamido-4,5-dihydroxy-6-(hydroxymethyl)tetrahydro-2H-py ran-2-yl)oxy)pentanamido)propyl)-2-((hydroxyl)methyl)-4-met hoxytetrahydrofuran-3-oxyl
cttgagagctgcttctaaaa

SEQ ID NO: 948 - RNA, 20 nt, synthetic construct
  source 1..20: mol_type = other RNA
  modified_base 1: mod_base = OTHER; note = 2'-O-methyl-guanosine with phosphorothioate linkage
  modified_base 2: mod_base = OTHER; note = 2'-O-methyl-guanosine with phosphorothioate linkage
  modified_base 3: mod_base = OTHER; note = 2'-O-methyl-guanosine
  modified_base 4: mod_base = OTHER; note = 2'-O-methyl-cytidine
  modified_base 5: mod_base = OTHER; note = 2'-O-methyl-adenosine
  modified_base 6: mod_base = OTHER; note = 2'-fluoro-uridine
  modified_base 7: mod_base = OTHER; note = 2'-O-methyl-uridine
  modified_base 8: mod_base = OTHER; note = 2'-fluoro-uridine
  modified_base 9: mod_base = OTHER; note = 2'-fluoro-uridine
  modified_base 10: mod_base = OTHER; note = 2'-fluoro-uridine
  modified_base 11: mod_base = OTHER; note = 2'-fluoro-cytidine
  modified_base 12: mod_base = OTHER; note = 2'-O-methyl-adenosine
  modified_base 13: mod_base = OTHER; note = 2'-O-methyl-adenosine
  modified_base 14: mod_base = OTHER; note = 2'-O-methyl-adenosine
  modified_base 15: mod_base = OTHER; note = 2'-O-methyl-adenosine
  modified_base 16: mod_base = OTHER; note = 2'-O-methyl-cytidine
  modified_base 17: mod_base = OTHER; note = 2'-O-methyl-adenosine
  modified_base 18: mod_base = OTHER; note = 2'-O-methyl-uridine with phosphorothioate linkage
  modified_base 19: mod_base = OTHER; note = 2'-O-methyl-uridine with phosphorothioate linkage
  modified_base 20: mod_base = OTHER; note = 2'-O-methyl-adenosine conjugated to 3 iterations of (2R,3R,4R,5S)-5-(3-(5-(((2R,3R,4R,5R,6R)- 3-acetamido-4,5-dihydroxy-6-(hydroxymethyl)tetrahydro-2H-py ran-2-yl)oxy)pentanamido)propyl)-2-((hydroxyl)methyl)-4-met hoxytetrahydrofuran-3-oxyl
gggcatttttcaaaacatta

SEQ ID NO: 949 - RNA, 20 nt, synthetic construct
  source 1..20: mol_type = other RNA
  modified_base 1: mod_base = OTHER; note = 2'-O-methyl-cytidine with phosphorothioate linkage
  modified_base 2: mod_base = OTHER; note = 2'-O-methyl-adenosine with phosphorothioate linkage
  modified_base 3: mod_base = OTHER; note = 2'-O-methyl-uridine
  modified_base 4: mod_base = OTHER; note = 2'-O-methyl-cytidine
  modified_base 5: mod_base = OTHER; note = 2'-O-methyl-uridine
  modified_base 6: mod_base = OTHER; note = 2'-fluoro-adenosine
  modified_base 7: mod_base = OTHER; note = 2'-O-methyl-guanosine
  modified_base 8: mod_base = OTHER; note = 2'-fluoro-cytidine
  modified_base 9: mod_base = OTHER; note = 2'-fluoro-cytidine
  modified_base 10: mod_base = OTHER; note = 2'-fluoro-uridine
  modified_base 11: mod_base = OTHER; note = 2'-fluoro-uridine
  modified_base 12: mod_base = OTHER; note = 2'-O-methyl-guanosine
  modified_base 13: mod_base = OTHER; note = 2'-O-methyl-cytidine
  modified_base 14: mod_base = OTHER; note = 2'-O-methyl-uridine
  modified_base 15: mod_base = OTHER; note = 2'-O-methyl-uridine
  modified_base 16: mod_base = OTHER; note = 2'-O-methyl-uridine
  modified_base 17: mod_base = OTHER; note = 2'-O-methyl-adenosine
  modified_base 18: mod_base = OTHER; note = 2'-O-methyl-uridine with phosphorothioate linkage
  modified_base 19: mod_base = OTHER; note = 2'-O-methyl-adenosine with phosphorothioate linkage
  modified_base 20: mod_base = OTHER; note = 2'-O-methyl-adenosine conjugated to 3 iterations of (2R,3R,4R,5S)-5-(3-(5-(((2R,3R,4R,5R,6R)- 3-acetamido-4,5-dihydroxy-6-(hydroxymethyl)tetrahydro-2H-py ran-2-yl)oxy)pentanamido)propyl)-2-((hydroxyl)methyl)-4-met hoxytetrahydrofuran-3-oxyl
catctagccttgctttataa

SEQ ID NO: 950 - RNA, 20 nt, synthetic construct
  source 1..20: mol_type = other RNA
  modified_base 1: mod_base = OTHER; note = 2'-O-methyl-cytidine with phosphorothioate linkage
  modified_base 2: mod_base = OTHER; note = 2'-O-methyl-uridine with phosphorothioate linkage
  modified_base 3: mod_base = OTHER; note = 2'-O-methyl-adenosine
  modified_base 4: mod_base = OTHER; note = 2'-O-methyl-guanosine
  modified_base 5: mod_base = OTHER; note = 2'-O-methyl-cytidine
  modified_base 6: mod_base = OTHER; note = 2'-fluoro-cytidine
  modified_base 7: mod_base = OTHER; note = 2'-O-methyl-uridine
  modified_base 8: mod_base = OTHER; note = 2'-fluoro-uridine
  modified_base 9: mod_base = OTHER; note = 2'-fluoro-guanosine
  modified_base 10: mod_base = OTHER; note = 2'-fluoro-cytidine
  modified_base 11: mod_base = OTHER; note = 2'-fluoro-uridine
  modified_base 12: mod_base = OTHER; note = 2'-O-methyl-uridine
  modified_base 13: mod_base = OTHER; note = 2'-O-methyl-uridine
  modified_base 14: mod_base = OTHER; note = 2'-O-methyl-adenosine
  modified_base 15: mod_base = OTHER; note = 2'-O-methyl-uridine
  modified_base 16: mod_base = OTHER; note = 2'-O-methyl-adenosine
  modified_base 17: mod_base = OTHER; note = 2'-O-methyl-uridine
  modified_base 18: mod_base = OTHER; note = 2'-O-methyl-uridine with phosphorothioate linkage
  modified_base 19: mod_base = OTHER; note = 2'-O-methyl-uridine with phosphorothioate linkage
  modified_base 20: mod_base = OTHER; note = 2'-O-methyl-adenosine conjugated to 3 iterations of (2R,3R,4R,5S)-5-(3-(5-(((2R,3R,4R,5R,6R)- 3-acetamido-4,5-dihydroxy-6-(hydroxymethyl)tetrahydro-2H-py ran-2-yl)oxy)pentanamido)propyl)-2-((hydroxyl)methyl)-4-met hoxytetrahydrofuran-3-oxyl
ctagccttgctttatattta

SEQ ID NO: 951 - RNA, 20 nt, synthetic construct
  source 1..20: mol_type = other RNA
  modified_base 1: mod_base = OTHER; note = 2'-O-methyl-guanosine with phosphorothioate linkage
  modified_base 2: mod_base = OTHER; note = 2'-O-methyl-cytidine with phosphorothioate linkage
  modified_base 3: mod_base = OTHER; note = 2'-O-methyl-cytidine
  modified_base 4: mod_base = OTHER; note = 2'-O-methyl-uridine
  modified_base 5: mod_base = OTHER; note = 2'-O-methyl-uridine
  modified_base 6: mod_base = OTHER; note = 2'-fluoro-guanosine
  modified_base 7: mod_base = OTHER; note = 2'-O-methyl-cytidine
  modified_base 8: mod_base = OTHER; note = 2'-fluoro-uridine
  modified_base 9: mod_base = OTHER; note = 2'-fluoro-uridine
  modified_base 10: mod_base = OTHER; note = 2'-fluoro-uridine
  modified_base 11: mod_base = OTHER; note = 2'-fluoro-adenosine
  modified_base 12: mod_base = OTHER; note = 2'-O-methyl-uridine
  modified_base 13: mod_base = OTHER; note = 2'-O-methyl-adenosine
  modified_base 14: mod_base = OTHER; note = 2'-O-methyl-uridine
  modified_base 15: mod_base = OTHER; note = 2'-O-methyl-uridine
  modified_base 16: mod_base = OTHER; note = 2'-O-methyl-uridine
  modified_base 17: mod_base = OTHER; note = 2'-O-methyl-cytidine
  modified_base 18: mod_base = OTHER; note = 2'-O-methyl-adenosine with phosphorothioate linkage
  modified_base 19: mod_base = OTHER; note = 2'-O-methyl-uridine with phosphorothioate linkage
  modified_base 20: mod_base = OTHER; note = 2'-O-methyl-adenosine conjugated to 3 iterations of (2R,3R,4R,5S)-5-(3-(5-(((2R,3R,4R,5R,6R)- 3-acetamido-4,5-dihydroxy-6-(hydroxymethyl)tetrahydro-2H-py ran-2-yl)oxy)pentanamido)propyl)-2-((hydroxyl)methyl)-4-met hoxytetrahydrofuran-3-oxyl
gccttgctttatatttcata

SEQ ID NO: 952 - RNA, 20 nt, synthetic construct
  source 1..20: mol_type = other RNA
  modified_base 1: mod_base = OTHER; note = 2'-O-methyl-cytidine with phosphorothioate linkage
  modified_base 2: mod_base = OTHER; note = 2'-O-methyl-uridine with phosphorothioate linkage
  modified_base 3: mod_base = OTHER; note = 2'-O-methyl-uridine
  modified_base 4: mod_base = OTHER; note = 2'-O-methyl-adenosine
  modified_base 5: mod_base = OTHER; note = 2'-O-methyl-adenosine
  modified_base 6: mod_base = OTHER; note = 2'-fluoro-uridine
  modified_base 7: mod_base = OTHER; note = 2'-O-methyl-adenosine
  modified_base 8: mod_base = OTHER; note = 2'-fluoro-uridine
  modified_base 9: mod_base = OTHER; note = 2'-fluoro-uridine
  modified_base 10: mod_base = OTHER; note = 2'-fluoro-cytidine
  modified_base 11: mod_base = OTHER; note = 2'-fluoro-cytidine
  modified_base 12: mod_base = OTHER; note = 2'-O-methyl-cytidine
  modified_base 13: mod_base = OTHER; note = 2'-O-methyl-uridine
  modified_base 14: mod_base = OTHER; note = 2'-O-methyl-cytidine
  modified_base 15: mod_base = OTHER; note = 2'-O-methyl-adenosine
  modified_base 16: mod_base = OTHER; note = 2'-O-methyl-cytidine
  modified_base 17: mod_base = OTHER; note = 2'-O-methyl-uridine
  modified_base 18: mod_base = OTHER; note = 2'-O-methyl-adenosine with phosphorothioate linkage
  modified_base 19: mod_base = OTHER; note = 2'-O-methyl-uridine with phosphorothioate linkage
  modified_base 20: mod_base = OTHER; note = 2'-O-methyl-adenosine conjugated to 3 iterations of (2R,3R,4R,5S)-5-(3-(5-(((2R,3R,4R,5R,6R)- 3-acetamido-4,5-dihydroxy-6-(hydroxymethyl)tetrahydro-2H-py ran-2-yl)oxy)pentanamido)propyl)-2-((hydroxyl)methyl)-4-met hoxytetrahydrofuran-3-oxyl
cttaatattccctcactata

SEQ ID NO: 953 - RNA, 20 nt, synthetic construct
  source 1..20: mol_type = other RNA
  modified_base 1: mod_base = OTHER; note = 2'-O-methyl-guanosine with phosphorothioate linkage
  modified_base 2: mod_base = OTHER; note = 2'-O-methyl-cytidine with phosphorothioate linkage
  modified_base 3: mod_base = OTHER; note = 2'-O-methyl-cytidine
  modified_base 4: mod_base = OTHER; note = 2'-O-methyl-uridine
  modified_base 5: mod_base = OTHER; note = 2'-O-methyl-uridine
  modified_base 6: mod_base = OTHER; note = 2'-fluoro-cytidine
  modified_base 7: mod_base = OTHER; note = 2'-O-methyl-uridine
  modified_base 8: mod_base = OTHER; note = 2'-fluoro-adenosine
  modified_base 9: mod_base = OTHER; note = 2'-fluoro-adenosine
  modified_base 10: mod_base = OTHER; note = 2'-fluoro-uridine
  modified_base 11: mod_base = OTHER; note = 2'-fluoro-guanosine
  modified_base 12: mod_base = OTHER; note = 2'-O-methyl-adenosine
  modified_base 13: mod_base = OTHER; note = 2'-O-methyl-adenosine
  modified_base 14: mod_base = OTHER; note = 2'-O-methyl-adenosine
  modified_base 15: mod_base = OTHER; note = 2'-O-methyl-guanosine
  modified_base 16: mod_base = OTHER; note = 2'-O-methyl-adenosine
  modified_base 17: mod_base = OTHER; note = 2'-O-methyl-guanosine
  modified_base 18: mod_base = OTHER; note = 2'-O-methyl-adenosine with phosphorothioate linkage
  modified_base 19: mod_base = OTHER; note = 2'-O-methyl-adenosine with phosphorothioate linkage
  modified_base 20: mod_base = OTHER; note = 2'-O-methyl-adenosine conjugated to 3 iterations of (2R,3R,4R,5S)-5-(3-(5-(((2R,3R,4R,5R,6R)- 3-acetamido-4,5-dihydroxy-6-(hydroxymethyl)tetrahydro-2H-py ran-2-yl)oxy)pentanamido)propyl)-2-((hydroxyl)methyl)-4-met hoxytetrahydrofuran-3-oxyl
gccttctaatgaaagagaaa

SEQ ID NO: 954 - RNA, 20 nt, synthetic construct
  source 1..20: mol_type = other RNA
  modified_base 1: mod_base = OTHER; note = 2'-O-methyl-guanosine with phosphorothioate linkage
  modified_base 2: mod_base = OTHER; note = 2'-O-methyl-adenosine with phosphorothioate linkage
  modified_base 3: mod_base = OTHER; note = 2'-O-methyl-adenosine
  modified_base 4: mod_base = OTHER; note = 2'-O-methyl-adenosine
  modified_base 5: mod_base = OTHER; note = 2'-O-methyl-guanosine
  modified_base 6: mod_base = OTHER; note = 2'-fluoro-adenosine
  modified_base 7: mod_base = OTHER; note = 2'-O-methyl-guanosine
  modified_base 8: mod_base = OTHER; note = 2'-fluoro-adenosine
  modified_base 9: mod_base = OTHER; note = 2'-fluoro-adenosine
  modified_base 10: mod_base = OTHER; note = 2'-fluoro-uridine
  modified_base 11: mod_base = OTHER; note = 2'-fluoro-cytidine
  modified_base 12: mod_base = OTHER; note = 2'-O-methyl-cytidine
  modified_base 13: mod_base = OTHER; note = 2'-O-methyl-cytidine
  modified_base 14: mod_base = OTHER; note = 2'-O-methyl-uridine
  modified_base 15: mod_base = OTHER; note = 2'-O-methyl-uridine
  modified_base 16: mod_base = OTHER; note = 2'-O-methyl-adenosine
  modified_base 17: mod_base = OTHER; note = 2'-O-methyl-guanosine
  modified_base 18: mod_base = OTHER; note = 2'-O-methyl-uridine with phosphorothioate linkage
  modified_base 19: mod_base = OTHER; note = 2'-O-methyl-adenosine with phosphorothioate linkage
  modified_base 20: mod_base = OTHER; note = 2'-O-methyl-adenosine conjugated to 3 iterations of (2R,3R,4R,5S)-5-(3-(5-(((2R,3R,4R,5R,6R)- 3-acetamido-4,5-dihydroxy-6-(hydroxymethyl)tetrahydro-2H-py ran-2-yl)oxy)pentanamido)propyl)-2-((hydroxyl)methyl)-4-met hoxytetrahydrofuran-3-oxyl
gaaagagaatcccttagtaa

SEQ ID NO: 955 - RNA, 20 nt, synthetic construct
  source 1..20: mol_type = other RNA
  modified_base 1: mod_base = OTHER; note = 2'-O-methyl-cytidine with phosphorothioate linkage
  modified_base 2: mod_base = OTHER; note = 2'-O-methyl-cytidine with phosphorothioate linkage
  modified_base 3: mod_base = OTHER; note = 2'-O-methyl-adenosine
  modified_base 4: mod_base = OTHER; note = 2'-O-methyl-adenosine
  modified_base 5: mod_base = OTHER; note = 2'-O-methyl-guanosine
  modified_base 6: mod_base = OTHER; note = 2'-fluoro-guanosine
  modified_base 7: mod_base = OTHER; note = 2'-O-methyl-adenosine
  modified_base 8: mod_base = OTHER; note = 2'-fluoro-uridine
  modified_base 9: mod_base = OTHER; note = 2'-fluoro-cytidine
  modified_base 10: mod_base = OTHER; note = 2'-fluoro-adenosine
  modified_base 11: mod_base = OTHER; note = 2'-fluoro-guanosine
  modified_base 12: mod_base = OTHER; note = 2'-O-methyl-adenosine
  modified_base 13: mod_base = OTHER; note = 2'-O-methyl-guanosine
  modified_base 14: mod_base = OTHER; note = 2'-O-methyl-adenosine
  modified_base 15: mod_base = OTHER; note = 2'-O-methyl-uridine
  modified_base 16: mod_base = OTHER; note = 2'-O-methyl-uridine
  modified_base 17: mod_base = OTHER; note = 2'-O-methyl-adenosine
  modified_base 18: mod_base = OTHER; note = 2'-O-methyl-adenosine with phosphorothioate linkage
  modified_base 19: mod_base = OTHER; note = 2'-O-methyl-adenosine with phosphorothioate linkage
  modified_base 20: mod_base = OTHER; note = 2'-O-methyl-adenosine conjugated to 3 iterations of (2R,3R,4R,5S)-5-(3-(5-(((2R,3R,4R,5R,6R)- 3-acetamido-4,5-dihydroxy-6-(hydroxymethyl)tetrahydro-2H-py ran-2-yl)oxy)pentanamido)propyl)-2-((hydroxyl)methyl)-4-met hoxytetrahydrofuran-3-oxyl
ccaaggatcagagattaaaa

SEQ ID NO: 956 - RNA, 20 nt, synthetic construct
  source 1..20: mol_type = other RNA
  modified_base 1: mod_base = OTHER; note = 2'-O-methyl-cytidine with phosphorothioate linkage
  modified_base 2: mod_base = OTHER; note = 2'-O-methyl-cytidine with phosphorothioate linkage
  modified_base 3: mod_base = OTHER; note = 2'-O-methyl-adenosine
  modified_base 4: mod_base = OTHER; note = 2'-O-methyl-uridine
  modified_base 5: mod_base = OTHER; note = 2'-O-methyl-uridine
  modified_base 6: mod_base = OTHER; note = 2'-fluoro-cytidine
  modified_base 7: mod_base = OTHER; note = 2'-O-methyl-adenosine
  modified_base 8: mod_base = OTHER; note = 2'-fluoro-adenosine
  modified_base 9: mod_base = OTHER; note = 2'-fluoro-uridine
  modified_base 10: mod_base = OTHER; note = 2'-fluoro-guanosine
  modified_base 11: mod_base = OTHER; note = 2'-fluoro-adenosine
  modified_base 12: mod_base = OTHER; note = 2'-O-methyl-uridine
  modified_base 13: mod_base = OTHER; note = 2'-O-methyl-guanosine
  modified_base 14: mod_base = OTHER; note = 2'-O-methyl-adenosine
  modified_base 15: mod_base = OTHER; note = 2'-O-methyl-uridine
  modified_base 16: mod_base = OTHER; note = 2'-O-methyl-guanosine
  modified_base 17: mod_base = OTHER; note = 2'-O-methyl-adenosine
  modified_base 18: mod_base = OTHER; note = 2'-O-methyl-uridine with phosphorothioate linkage
  modified_base 19: mod_base = OTHER; note = 2'-O-methyl-adenosine with phosphorothioate linkage
  modified_base 20: mod_base = OTHER; note = 2'-O-methyl-adenosine conjugated to 3 iterations of (2R,3R,4R,5S)-5-(3-(5-(((2R,3R,4R,5R,6R)- 3-acetamido-4,5-dihydroxy-6-(hydroxymethyl)tetrahydro-2H-py ran-2-yl)oxy)pentanamido)propyl)-2-((hydroxyl)methyl)-4-met hoxytetrahydrofuran-3-oxyl
ccattcaatgatgatgataa

SEQ ID NO: 957 - RNA, 20 nt, synthetic construct
  source 1..20: mol_type = other RNA
  modified_base 1: mod_base = OTHER; note = 2'-O-methyl-guanosine with phosphorothioate linkage
  modified_base 2: mod_base = OTHER; note = 2'-O-methyl-uridine with phosphorothioate linkage
  modified_base 3: mod_base = OTHER; note = 2'-O-methyl-uridine
  modified_base 4: mod_base = OTHER; note = 2'-O-methyl-uridine
  modified_base 5: mod_base = OTHER; note = 2'-O-methyl-guanosine
  modified_base 6: mod_base = OTHER; note = 2'-fluoro-uridine
  modified_base 7: mod_base = OTHER; note = 2'-O-methyl-cytidine
  modified_base 8: mod_base = OTHER; note = 2'-fluoro-uridine
  modified_base 9: mod_base = OTHER; note = 2'-fluoro-uridine
  modified_base 10: mod_base = OTHER; note = 2'-fluoro-uridine
  modified_base 11: mod_base = OTHER; note = 2'-fluoro-guanosine
  modified_base 12: mod_base = OTHER; note = 2'-O-methyl-guanosine
  modified_base 13: mod_base = OTHER; note = 2'-O-methyl-cytidine
  modified_base 14: mod_base = OTHER; note = 2'-O-methyl-adenosine
  modified_base 15: mod_base = OTHER; note = 2'-O-methyl-uridine
  modified_base 16: mod_base = OTHER; note = 2'-O-methyl-uridine
  modified_base 17: mod_base = OTHER; note = 2'-O-methyl-cytidine
  modified_base 18: mod_base = OTHER; note = 2'-O-methyl-adenosine with phosphorothioate linkage
  modified_base 19: mod_base = OTHER; note = 2'-O-methyl-uridine with phosphorothioate linkage
  modified_base 20: mod_base = OTHER; note = 2'-O-methyl-adenosine conjugated to 3 iterations of (2R,3R,4R,5S)-5-(3-(5-(((2R,3R,4R,5R,6R)- 3-acetamido-4,5-dihydroxy-6-(hydroxymethyl)tetrahydro-2H-py ran-2-yl)oxy)pentanamido)propyl)-2-((hydroxyl)methyl)-4-met hoxytetrahydrofuran-3-oxyl
gtttgtctttggcattcata

SEQ ID NO: 958 - RNA, 20 nt, synthetic construct
  source 1..20: mol_type = other RNA
  modified_base 1: mod_base = OTHER; note = 2'-O-methyl-cytidine with phosphorothioate linkage
  modified_base 2: mod_base = OTHER; note = 2'-O-methyl-uridine with phosphorothioate linkage
  modified_base 3: mod_base = OTHER; note = 2'-O-methyl-uridine
  modified_base 4: mod_base = OTHER; note = 2'-O-methyl-uridine
  modified_base 5: mod_base = OTHER; note = 2'-O-methyl-guanosine
  modified_base 6: mod_base = OTHER; note = 2'-fluoro-guanosine
  modified_base 7: mod_base = OTHER; note = 2'-O-methyl-cytidine
  modified_base 8: mod_base = OTHER; note = 2'-fluoro-adenosine
  modified_base 9: mod_base = OTHER; note = 2'-fluoro-uridine
  modified_base 10: mod_base = OTHER; note = 2'-fluoro-uridine
  modified_base 11: mod_base = OTHER; note = 2'-fluoro-cytidine
  modified_base 12: mod_base = OTHER; note = 2'-O-methyl-adenosine
  modified_base 13: mod_base = OTHER; note = 2'-O-methyl-uridine
  modified_base 14: mod_base = OTHER; note = 2'-O-methyl-cytidine
  modified_base 15: mod_base = OTHER; note = 2'-O-methyl-uridine
  modified_base 16: mod_base = OTHER; note = 2'-O-methyl-uridine
  modified_base 17: mod_base = OTHER; note = 2'-O-methyl-cytidine
  modified_base 18: mod_base = OTHER; note = 2'-O-methyl-uridine with phosphorothioate linkage
  modified_base 19: mod_base = OTHER; note = 2'-O-methyl-uridine with phosphorothioate linkage
  modified_base 20: mod_base = OTHER; note = 2'-O-methyl-adenosine conjugated to 3 iterations of (2R,3R,4R,5S)-5-(3-(5-(((2R,3R,4R,5R,6R)- 3-acetamido-4,5-dihydroxy-6-(hydroxymethyl)tetrahydro-2H-py ran-2-yl)oxy)pentanamido)propyl)-2-((hydroxyl)methyl)-4-met hoxytetrahydrofuran-3-oxyl
ctttggcattcatcttctta

SEQ ID NO: 959 - RNA, 20 nt, synthetic construct
  source 1..20: mol_type = other RNA
  modified_base 1: mod_base = OTHER; note = 2'-O-methyl-guanosine with phosphorothioate linkage
  modified_base 2: mod_base = OTHER; note = 2'-O-methyl-cytidine with phosphorothioate linkage
  modified_base 3: mod_base = OTHER; note = 2'-O-methyl-adenosine
  modified_base 4: mod_base = OTHER; note = 2'-O-methyl-uridine
  modified_base 5: mod_base = OTHER; note = 2'-O-methyl-uridine
  modified_base 6: mod_base = OTHER; note = 2'-fluoro-cytidine
  modified_base 7: mod_base = OTHER; note = 2'-O-methyl-adenosine
  modified_base 8: mod_base = OTHER; note = 2'-fluoro-uridine
  modified_base 9: mod_base = OTHER; note = 2'-fluoro-cytidine
  modified_base 10: mod_base = OTHER; note = 2'-fluoro-uridine
  modified_base 11: mod_base = OTHER; note = 2'-fluoro-uridine
  modified_base 12: mod_base = OTHER; note = 2'-O-methyl-cytidine
  modified_base 13: mod_base = OTHER; note = 2'-O-methyl-uridine
  modified_base 14: mod_base = OTHER; note = 2'-O-methyl-uridine
  modified_base 15: mod_base = OTHER; note = 2'-O-methyl-uridine
  modified_base 16: mod_base = OTHER; note = 2'-O-methyl-uridine
  modified_base 17: mod_base = OTHER; note = 2'-O-methyl-adenosine
  modified_base 18: mod_base = OTHER; note = 2'-O-methyl-guanosine with phosphorothioate linkage
  modified_base 19: mod_base = OTHER; note = 2'-O-methyl-uridine with phosphorothioate linkage
  modified_base 20: mod_base = OTHER; note = 2'-O-methyl-adenosine conjugated to 3 iterations of (2R,3R,4R,5S)-5-(3-(5-(((2R,3R,4R,5R,6R)- 3-acetamido-4,5-dihydroxy-6-(hydroxymethyl)tetrahydro-2H-py ran-2-yl)oxy)pentanamido)propyl)-2-((hydroxyl)methyl)-4-met hoxytetrahydrofuran-3-oxyl
gcattcatcttcttttagta

SEQ ID NO: 960 - RNA, 20 nt, synthetic construct
  source 1..20: mol_type = other RNA
  modified_base 1: mod_base = OTHER; note = 2'-O-methyl-guanosine with phosphorothioate linkage
  modified_base 2: mod_base = OTHER; note = 2'-O-methyl-guanosine with phosphorothioate linkage
  modified_base 3: mod_base = OTHER; note = 2'-O-methyl-cytidine
  modified_base 4: mod_base = OTHER; note = 2'-O-methyl-adenosine
  modified_base 5: mod_base = OTHER; note = 2'-O-methyl-cytidine
  modified_base 6: mod_base = OTHER; note = 2'-fluoro-uridine
  modified_base 7: mod_base = OTHER; note = 2'-O-methyl-adenosine
  modified_base 8: mod_base = OTHER; note = 2'-fluoro-uridine
  modified_base 9: mod_base = OTHER; note = 2'-fluoro-adenosine
  modified_base 10: mod_base = OTHER; note = 2'-fluoro-guanosine
  modified_base 11: mod_base = OTHER; note = 2'-fluoro-adenosine
  modified_base 12: mod_base = OTHER; note = 2'-O-methyl-guanosine
  modified_base 13: mod_base = OTHER; note = 2'-O-methyl-uridine
  modified_base 14: mod_base = OTHER; note = 2'-O-methyl-adenosine
  modified_base 15: mod_base = OTHER; note = 2'-O-methyl-uridine
  modified_base 16: mod_base = OTHER; note = 2'-O-methyl-uridine
  modified_base 17: mod_base = OTHER; note = 2'-O-methyl-uridine
  modified_base 18: mod_base = OTHER; note = 2'-O-methyl-guanosine with phosphorothioate linkage
  modified_base 19: mod_base = OTHER; note = 2'-O-methyl-uridine with phosphorothioate linkage
  modified_base 20: mod_base = OTHER; note = 2'-O-methyl-adenosine conjugated to 3 iterations of (2R,3R,4R,5S)-5-(3-(5-(((2R,3R,4R,5R,6R)- 3-acetamido-4,5-dihydroxy-6-(hydroxymethyl)tetrahydro-2H-py ran-2-yl)oxy)pentanamido)propyl)-2-((hydroxyl)methyl)-4-met hoxytetrahydrofuran-3-oxyl
ggcactatagagtatttgta

SEQ ID NO: 961 - RNA, 20 nt, synthetic construct
  source 1..20: mol_type = other RNA
  modified_base 1: mod_base = OTHER; note = 2'-O-methyl-guanosine with phosphorothioate linkage
  modified_base 2: mod_base = OTHER; note = 2'-O-methyl-adenosine with phosphorothioate linkage
  modified_base 3: mod_base = OTHER; note = 2'-O-methyl-adenosine
  modified_base 4: mod_base = OTHER; note = 2'-O-methyl-uridine
  modified_base 5: mod_base = OTHER; note = 2'-O-methyl-guanosine
  modified_base 6: mod_base = OTHER; note = 2'-fluoro-uridine
  modified_base 7: mod_base = OTHER; note = 2'-O-methyl-cytidine
  modified_base 8: mod_base = OTHER; note = 2'-fluoro-uridine
  modified_base 9: mod_base = OTHER; note = 2'-fluoro-adenosine
  modified_base 10: mod_base = OTHER; note = 2'-fluoro-cytidine
  modified_base 11: mod_base = OTHER; note = 2'-fluoro-uridine
  modified_base 12: mod_base = OTHER; note = 2'-O-methyl-uridine
  modified_base 13: mod_base = OTHER; note = 2'-O-methyl-uridine
  modified_base 14: mod_base = OTHER; note = 2'-O-methyl-uridine
  modified_base 15: mod_base = OTHER; note = 2'-O-methyl-guanosine
  modified_base 16: mod_base = OTHER; note = 2'-O-methyl-cytidine
  modified_base 17: mod_base = OTHER; note = 2'-O-methyl-uridine
  modified_base 18: mod_base = OTHER; note = 2'-O-methyl-uridine with phosphorothioate linkage
  modified_base 19: mod_base = OTHER; note = 2'-O-methyl-uridine with phosphorothioate linkage
  modified_base 20: mod_base = OTHER; note = 2'-O-methyl-adenosine conjugated to 3 iterations of (2R,3R,4R,5S)-5-(3-(5-(((2R,3R,4R,5R,6R)- 3-acetamido-4,5-dihydroxy-6-(hydroxymethyl)tetrahydro-2H-py ran-2-yl)oxy)pentanamido)propyl)-2-((hydroxyl)methyl)-4-met hoxytetrahydrofuran-3-oxyl
gaatgtctacttttgcttta

SEQ ID NO: 962 - RNA, 20 nt, synthetic construct
  source 1..20: mol_type = other RNA
  modified_base 1: mod_base = OTHER; note = 2'-O-methyl-cytidine with phosphorothioate linkage
  modified_base 2: mod_base = OTHER; note = 2'-O-methyl-adenosine with phosphorothioate linkage
  modified_base 3: mod_base = OTHER; note = 2'-O-methyl-guanosine
  modified_base 4: mod_base = OTHER; note = 2'-O-methyl-cytidine
  modified_base 5: mod_base = OTHER; note = 2'-O-methyl-adenosine
  modified_base 6: mod_base = OTHER; note = 2'-fluoro-adenosine
  modified_base 7: mod_base = OTHER; note = 2'-O-methyl-adenosine
  modified_base 8: mod_base = OTHER; note = 2'-fluoro-adenosine
  modified_base 9: mod_base = OTHER; note = 2'-fluoro-uridine
  modified_base 10: mod_base = OTHER; note = 2'-fluoro-uridine
  modified_base 11: mod_base = OTHER; note = 2'-fluoro-adenosine
  modified_base 12: mod_base = OTHER; note = 2'-O-methyl-guanosine
  modified_base 13: mod_base = OTHER; note = 2'-O-methyl-guanosine
  modified_base 14: mod_base = OTHER; note = 2'-O-methyl-uridine
  modified_base 15: mod_base = OTHER; note = 2'-O-methyl-adenosine
  modified_base 16: mod_base = OTHER; note = 2'-O-methyl-adenosine
  modified_base 17: mod_base = OTHER; note = 2'-O-methyl-cytidine
  modified_base 18: mod_base = OTHER; note = 2'-O-methyl-adenosine with phosphorothioate linkage
  modified_base 19: mod_base = OTHER; note = 2'-O-methyl-adenosine with phosphorothioate linkage
  modified_base 20: mod_base = OTHER; note = 2'-O-methyl-adenosine conjugated to 3 iterations of (2R,3R,4R,5S)-5-(3-(5-(((2R,3R,4R,5R,6R)- 3-acetamido-4,5-dihydroxy-6-(hydroxymethyl)tetrahydro-2H-py ran-2-yl)oxy)pentanamido)propyl)-2-((hydroxyl)methyl)-4-met hoxytetrahydrofuran-3-oxyl
cagcaaaattaggtaacaaa

SEQ ID NO: 963 - RNA, 20 nt, synthetic construct
  source 1..20: mol_type = other RNA
  modified_base 1: mod_base = OTHER; note = 2'-O-methyl-guanosine with phosphorothioate linkage
  modified_base 2: mod_base = OTHER; note = 2'-O-methyl-adenosine with phosphorothioate linkage
  modified_base 3: mod_base = OTHER; note = 2'-O-methyl-adenosine
  modified_base 4: mod_base = OTHER; note = 2'-O-methyl-cytidine
  modified_base 5: mod_base = OTHER; note = 2'-O-methyl-uridine
  modified_base 6: mod_base = OTHER; note = 2'-fluoro-guanosine
  modified_base 7: mod_base = OTHER; note = 2'-O-methyl-cytidine
  modified_base 8: mod_base = OTHER; note = 2'-fluoro-cytidine
  modified_base 9: mod_base = OTHER; note = 2'-fluoro-adenosine
  modified_base 10: mod_base = OTHER; note = 2'-fluoro-guanosine
  modified_base 11: mod_base = OTHER; note = 2'-fluoro-cytidine
  modified_base 12: mod_base = OTHER; note = 2'-O-methyl-adenosine
  modified_base 13: mod_base = OTHER; note = 2'-O-methyl-uridine
  modified_base 14: mod_base = OTHER; note = 2'-O-methyl-adenosine
  modified_base 15: mod_base = OTHER; note = 2'-O-methyl-cytidine
  modified_base 16: mod_base = OTHER; note = 2'-O-methyl-uridine
  modified_base 17: mod_base = OTHER; note = 2'-O-methyl-uridine
  modified_base 18: mod_base = OTHER; note = 2'-O-methyl-uridine with phosphorothioate linkage
  modified_base 19: mod_base = OTHER; note = 2'-O-methyl-uridine with phosphorothioate linkage
  modified_base 20: mod_base = OTHER; note = 2'-O-methyl-adenosine conjugated to 3 iterations of (2R,3R,4R,5S)-5-(3-(5-(((2R,3R,4R,5R,6R)- 3-acetamido-4,5-dihydroxy-6-(hydroxymethyl)tetrahydro-2H-py ran-2-yl)oxy)pentanamido)propyl)-2-((hydroxyl)methyl)-4-met hoxytetrahydrofuran-3-oxyl
gaactgccagcatactttta

SEQ ID NO: 964 - RNA, 20 nt, synthetic construct
  source 1..20: mol_type = other RNA
  modified_base 1: mod_base = OTHER; note = 2'-O-methyl-guanosine with phosphorothioate linkage
  modified_base 2: mod_base = OTHER; note = 2'-O-methyl-cytidine with phosphorothioate linkage
  modified_base 3: mod_base = OTHER; note = 2'-O-methyl-cytidine
  modified_base 4: mod_base = OTHER; note = 2'-O-methyl-adenosine
  modified_base 5: mod_base = OTHER; note = 2'-O-methyl-guanosine
  modified_base 6: mod_base = OTHER; note = 2'-fluoro-cytidine
  modified_base 7: mod_base = OTHER; note = 2'-O-methyl-adenosine
  modified_base 8: mod_base = OTHER; note = 2'-fluoro-uridine
  modified_base 9: mod_base = OTHER; note = 2'-fluoro-adenosine
  modified_base 10: mod_base = OTHER; note = 2'-fluoro-cytidine
  modified_base 11: mod_base = OTHER; note = 2'-fluoro-uridine
  modified_base 12: mod_base = OTHER; note = 2'-O-methyl-uridine
  modified_base 13: mod_base = OTHER; note = 2'-O-methyl-uridine
  modified_base 14: mod_base = OTHER; note = 2'-O-methyl-uridine
  modified_base 15: mod_base = OTHER; note = 2'-O-methyl-cytidine
  modified_base 16: mod_base = OTHER; note = 2'-O-methyl-uridine
  modified_base 17: mod_base = OTHER; note = 2'-O-methyl-cytidine
  modified_base 18: mod_base = OTHER; note = 2'-O-methyl-uridine with phosphorothioate linkage
  modified_base 19: mod_base = OTHER; note = 2'-O-methyl-uridine with phosphorothioate linkage
  modified_base 20: mod_base = OTHER; note = 2'-O-methyl-adenosine conjugated to 3 iterations of (2R,3R,4R,5S)-5-(3-(5-(((2R,3R,4R,5R,6R)- 3-acetamido-4,5-dihydroxy-6-(hydroxymethyl)tetrahydro-2H-py ran-2-yl)oxy)pentanamido)propyl)-2-((hydroxyl)methyl)-4-met hoxytetrahydrofuran-3-oxyl
gccagcatacttttctctta

SEQ ID NO: 965 - RNA, 20 nt, synthetic construct
  source 1..20: mol_type = other RNA
  modified_base 1: mod_base = OTHER; note = 2'-O-methyl-cytidine with phosphorothioate linkage
  modified_base 2: mod_base = OTHER; note = 2'-O-methyl-uridine with phosphorothioate linkage
  modified_base 3: mod_base = OTHER; note = 2'-O-methyl-cytidine
  modified_base 4: mod_base = OTHER; note = 2'-O-methyl-uridine
  modified_base 5: mod_base = OTHER; note = 2'-O-methyl-uridine
  modified_base 6: mod_base = OTHER; note = 2'-fluoro-uridine
  modified_base 7: mod_base = OTHER; note = 2'-O-methyl-cytidine
  modified_base 8: mod_base = OTHER; note = 2'-fluoro-adenosine
  modified_base 9: mod_base = OTHER; note = 2'-fluoro-guanosine
  modified_base 10: mod_base = OTHER; note = 2'-fluoro-uridine
  modified_base 11: mod_base = OTHER; note = 2'-fluoro-uridine
  modified_base 12: mod_base = OTHER; note = 2'-O-methyl-guanosine
  modified_base 13: mod_base = OTHER; note = 2'-O-methyl-uridine
  modified_base 14: mod_base = OTHER; note = 2'-O-methyl-adenosine
  modified_base 15: mod_base = OTHER; note = 2'-O-methyl-guanosine
  modified_base 16: mod_base = OTHER; note = 2'-O-methyl-adenosine
  modified_base 17: mod_base = OTHER; note = 2'-O-methyl-uridine
  modified_base 18: mod_base = OTHER; note = 2'-O-methyl-guanosine with phosphorothioate linkage
  modified_base 19: mod_base = OTHER; note = 2'-O-methyl-adenosine with phosphorothioate linkage
  modified_base 20: mod_base = OTHER; note = 2'-O-methyl-adenosine conjugated to 3 iterations of (2R,3R,4R,5S)-5-(3-(5-(((2R,3R,4R,5R,6R)- 3-acetamido-4,5-dihydroxy-6-(hydroxymethyl)tetrahydro-2H-py ran-2-yl)oxy)pentanamido)propyl)-2-((hydroxyl)methyl)-4-met hoxytetrahydrofuran-3-oxyl
ctctttcagttgtagatgaa

SEQ ID NO: 966 - RNA, 20 nt, synthetic construct
  source 1..20: mol_type = other RNA
  modified_base 1: mod_base = OTHER; note = 2'-O-methyl-cytidine with phosphorothioate linkage
  modified_base 2: mod_base = OTHER; note = 2'-O-methyl-uridine with phosphorothioate linkage
  modified_base 3: mod_base = OTHER; note = 2'-O-methyl-uridine
  modified_base 4: mod_base = OTHER; note = 2'-O-methyl-uridine
  modified_base 5: mod_base = OTHER; note = 2'-O-methyl-cytidine
  modified_base 6: mod_base = OTHER; note = 2'-fluoro-adenosine
  modified_base 7: mod_base = OTHER; note = 2'-O-methyl-guanosine
  modified_base 8: mod_base = OTHER; note = 2'-fluoro-uridine
  modified_base 9: mod_base = OTHER; note = 2'-fluoro-uridine
  modified_base 10: mod_base = OTHER; note = 2'-fluoro-guanosine
  modified_base 11: mod_base = OTHER; note = 2'-fluoro-uridine
  modified_base 12: mod_base = OTHER; note = 2'-O-methyl-adenosine
  modified_base 13: mod_base = OTHER; note = 2'-O-methyl-guanosine
  modified_base 14: mod_base = OTHER; note = 2'-O-methyl-adenosine
  modified_base 15: mod_base = OTHER; note = 2'-O-methyl-uridine
  modified_base 16: mod_base = OTHER; note = 2'-O-methyl-guanosine
  modified_base 17: mod_base = OTHER; note = 2'-O-methyl-adenosine
  modified_base 18: mod_base = OTHER; note = 2'-O-methyl-adenosine with phosphorothioate linkage
  modified_base 19: mod_base = OTHER; note = 2'-O-methyl-uridine with phosphorothioate linkage
  modified_base 20: mod_base = OTHER; note = 2'-O-methyl-adenosine conjugated to 3 iterations of (2R,3R,4R,5S)-5-(3-(5-(((2R,3R,4R,5R,6R)- 3-acetamido-4,5-dihydroxy-6-(hydroxymethyl)tetrahydro-2H-py ran-2-yl)oxy)pentanamido)propyl)-2-((hydroxyl)methyl)-4-met hoxytetrahydrofuran-3-oxyl
ctttcagttgtagatgaata

SEQ ID NO: 967 - RNA, 20 nt, synthetic construct
  source 1..20: mol_type = other RNA
  modified_base 1: mod_base = OTHER; note = 2'-O-methyl-cytidine with phosphorothioate linkage
  modified_base 2: mod_base = OTHER; note = 2'-O-methyl-adenosine with phosphorothioate linkage
  modified_base 3: mod_base = OTHER; note = 2'-O-methyl-adenosine
  modified_base 4: mod_base = OTHER; note = 2'-O-methyl-uridine
  modified_base 5: mod_base = OTHER; note = 2'-O-methyl-uridine
  modified_base 6: mod_base = OTHER; note = 2'-fluoro-guanosine
  modified_base 7: mod_base = OTHER; note = 2'-O-methyl-guanosine
  modified_base 8: mod_base = OTHER; note = 2'-fluoro-cytidine
  modified_base 9: mod_base = OTHER; note = 2'-fluoro-uridine
  modified_base 10: mod_base = OTHER; note = 2'-fluoro-cytidine
  modified_base 11: mod_base = OTHER; note = 2'-fluoro-cytidine
  modified_base 12: mod_base = OTHER; note = 2'-O-methyl-cytidine
  modified_base 13: mod_base = OTHER; note = 2'-O-methyl-adenosine
  modified_base 14: mod_base = OTHER; note = 2'-O-methyl-guanosine
  modified_base 15: mod_base = OTHER; note = 2'-O-methyl-adenosine
  modified_base 16: mod_base = OTHER; note = 2'-O-methyl-cytidine
  modified_base 17: mod_base = OTHER; note = 2'-O-methyl-adenosine
  modified_base 18: mod_base = OTHER; note = 2'-O-methyl-uridine with phosphorothioate linkage
  modified_base 19: mod_base = OTHER; note = 2'-O-methyl-adenosine with phosphorothioate linkage
  modified_base 20: mod_base = OTHER; note = 2'-O-methyl-adenosine conjugated to 3 iterations of (2R,3R,4R,5S)-5-(3-(5-(((2R,3R,4R,5R,6R)- 3-acetamido-4,5-dihydroxy-6-(hydroxymethyl)tetrahydro-2H-py ran-2-yl)oxy)pentanamido)propyl)-2-((hydroxyl)methyl)-4-met hoxytetrahydrofuran-3-oxyl
caattggctcccagacataa

SEQ ID NO: 968 - RNA, 20 nt, synthetic construct
  source 1..20: mol_type = other RNA
  modified_base 1: mod_base = OTHER; note = 2'-O-methyl-guanosine with phosphorothioate linkage
  modified_base 2: mod_base = OTHER; note = 2'-O-methyl-guanosine with phosphorothioate linkage
  modified_base 3: mod_base = OTHER; note = 2'-O-methyl-cytidine
  modified_base 4: mod_base = OTHER; note = 2'-O-methyl-uridine
  modified_base 5: mod_base = OTHER; note = 2'-O-methyl-cytidine
  modified_base 6: mod_base = OTHER; note = 2'-fluoro-cytidine
  modified_base 7: mod_base = OTHER; note = 2'-O-methyl-cytidine
  modified_base 8: mod_base = OTHER; note = 2'-fluoro-adenosine
  modified_base 9: mod_base = OTHER; note = 2'-fluoro-guanosine
  modified_base 10: mod_base = OTHER; note = 2'-fluoro-adenosine
  modified_base 11: mod_base = OTHER; note = 2'-fluoro-cytidine
  modified_base 12: mod_base = OTHER; note = 2'-O-methyl-adenosine
  modified_base 13: mod_base = OTHER; note = 2'-O-methyl-uridine
  modified_base 14: mod_base = OTHER; note = 2'-O-methyl-adenosine
  modified_base 15: mod_base = OTHER; note = 2'-O-methyl-adenosine
  modified_base 16: mod_base = OTHER; note = 2'-O-methyl-uridine
  modified_base 17: mod_base = OTHER; note = 2'-O-methyl-uridine
  modified_base 18: mod_base = OTHER; note = 2'-O-methyl-uridine with phosphorothioate linkage
  modified_base 19: mod_base = OTHER; note = 2'-O-methyl-uridine with phosphorothioate linkage
  modified_base 20: mod_base = OTHER; note = 2'-O-methyl-adenosine conjugated to 3 iterations of (2R,3R,4R,5S)-5-(3-(5-(((2R,3R,4R,5R,6R)- 3-acetamido-4,5-dihydroxy-6-(hydroxymethyl)tetrahydro-2H-py ran-2-yl)oxy)pentanamido)propyl)-2-((hydroxyl)methyl)-4-met hoxytetrahydrofuran-3-oxyl
ggctcccagacataatttta

SEQ ID NO: 969 - RNA, 20 nt, synthetic construct
  source 1..20: mol_type = other RNA
  modified_base 1: mod_base = OTHER; note = 2'-O-methyl-guanosine with phosphorothioate linkage
  modified_base 2: mod_base = OTHER; note = 2'-O-methyl-cytidine with phosphorothioate linkage
  modified_base 3: mod_base = OTHER; note = 2'-O-methyl-adenosine
  modified_base 4: mod_base = OTHER; note = 2'-O-methyl-uridine
  modified_base 5: mod_base = OTHER; note = 2'-O-methyl-cytidine
  modified_base 6: mod_base = OTHER; note = 2'-fluoro-uridine
  modified_base 7: mod_base = OTHER; note = 2'-O-methyl-uridine
  modified_base 8: mod_base = OTHER; note = 2'-fluoro-adenosine
  modified_base 9: mod_base = OTHER; note = 2'-fluoro-uridine
  modified_base 10: mod_base = OTHER; note = 2'-fluoro-uridine
  modified_base 11: mod_base = OTHER; note = 2'-fluoro-guanosine
  modified_base 12: mod_base = OTHER; note = 2'-O-methyl-guanosine
  modified_base 13: mod_base = OTHER; note = 2'-O-methyl-cytidine
  modified_base 14: mod_base = OTHER; note = 2'-O-methyl-uridine
  modified_base 15: mod_base = OTHER; note = 2'-O-methyl-uridine
  modified_base 16: mod_base = OTHER; note = 2'-O-methyl-adenosine
  modified_base 17: mod_base = OTHER; note = 2'-O-methyl-uridine
  modified_base 18: mod_base = OTHER; note = 2'-O-methyl-adenosine with phosphorothioate linkage
  modified_base 19: mod_base = OTHER; note = 2'-O-methyl-uridine with phosphorothioate linkage
  modified_base 20: mod_base = OTHER; note = 2'-O-methyl-adenosine conjugated to 3 iterations of (2R,3R,4R,5S)-5-(3-(5-(((2R,3R,4R,5R,6R)- 3-acetamido-4,5-dihydroxy-6-(hydroxymethyl)tetrahydro-2H-py ran-2-yl)oxy)pentanamido)propyl)-2-((hydroxyl)methyl)-4-met hoxytetrahydrofuran-3-oxyl
gcatcttattggcttatata

SEQ ID NO: 970 - RNA, 20 nt, synthetic construct
  source 1..20: mol_type = other RNA
  modified_base 1: mod_base = OTHER; note = 2'-O-methyl-guanosine with phosphorothioate linkage
  modified_base 2: mod_base = OTHER; note = 2'-O-methyl-adenosine with phosphorothioate linkage
  modified_base 3: mod_base = OTHER; note = 2'-O-methyl-adenosine
  modified_base 4: mod_base = OTHER; note = 2'-O-methyl-uridine
  modified_base 5: mod_base = OTHER; note = 2'-O-methyl-guanosine
  modified_base 6: mod_base = OTHER; note = 2'-fluoro-guanosine
  modified_base 7: mod_base = OTHER; note = 2'-O-methyl-uridine
  modified_base 8: mod_base = OTHER; note = 2'-fluoro-cytidine
  modified_base 9: mod_base = OTHER; note = 2'-fluoro-uridine
  modified_base 10: mod_base = OTHER; note = 2'-fluoro-guanosine
  modified_base 11: mod_base = OTHER; note = 2'-fluoro-guanosine
  modified_base 12: mod_base = OTHER; note = 2'-O-methyl-cytidine
  modified_base 13: mod_base = OTHER; note = 2'-O-methyl-uridine
  modified_base 14: mod_base = OTHER; note = 2'-O-methyl-uridine
  modified_base 15: mod_base = OTHER; note = 2'-O-methyl-adenosine
  modified_base 16: mod_base = OTHER; note = 2'-O-methyl-uridine
  modified_base 17: mod_base = OTHER; note = 2'-O-methyl-adenosine
  modified_base 18: mod_base = OTHER; note = 2'-O-methyl-cytidine with phosphorothioate linkage
  modified_base 19: mod_base = OTHER; note = 2'-O-methyl-adenosine with phosphorothioate linkage
  modified_base 20: mod_base = OTHER; note = 2'-O-methyl-adenosine conjugated to 3 iterations of (2R,3R,4R,5S)-5-(3-(5-(((2R,3R,4R,5R,6R)- 3-acetamido-4,5-dihydroxy-6-(hydroxymethyl)tetrahydro-2H-py ran-2-yl)oxy)pentanamido)propyl)-2-((hydroxyl)methyl)-4-met hoxytetrahydrofuran-3-oxyl
gaatggtctggcttatacaa

SEQ ID NO: 971 - RNA, 20 nt, synthetic construct
  source 1..20: mol_type = other RNA
  modified_base 1: mod_base = OTHER; note = 2'-O-methyl-guanosine with phosphorothioate linkage
  modified_base 2: mod_base = OTHER; note = 2'-O-methyl-guanosine with phosphorothioate linkage
  modified_base 3: mod_base = OTHER; note = 2'-O-methyl-uridine
  modified_base 4: mod_base = OTHER; note = 2'-O-methyl-cytidine
  modified_base 5: mod_base = OTHER; note = 2'-O-methyl-uridine
  modified_base 6: mod_base = OTHER; note = 2'-fluoro-guanosine
  modified_base 7: mod_base = OTHER; note = 2'-O-methyl-guanosine
  modified_base 8: mod_base = OTHER; note = 2'-fluoro-cytidine
  modified_base 9: mod_base = OTHER; note = 2'-fluoro-uridine
  modified_base 10: mod_base = OTHER; note = 2'-fluoro-uridine
  modified_base 11: mod_base = OTHER; note = 2'-fluoro-adenosine
  modified_base 12: mod_base = OTHER; note = 2'-O-methyl-uridine
  modified_base 13: mod_base = OTHER; note = 2'-O-methyl-adenosine
  modified_base 14: mod_base = OTHER; note = 2'-O-methyl-cytidine
  modified_base 15: mod_base = OTHER; note = 2'-O-methyl-adenosine
  modified_base 16: mod_base = OTHER; note = 2'-O-methyl-uridine
  modified_base 17: mod_base = OTHER; note = 2'-O-methyl-cytidine
  modified_base 18: mod_base = OTHER; note = 2'-O-methyl-uridine with phosphorothioate linkage
  modified_base 19: mod_base = OTHER; note = 2'-O-methyl-uridine with phosphorothioate linkage
  modified_base 20: mod_base = OTHER; note = 2'-O-methyl-adenosine conjugated to 3 iterations of (2R,3R,4R,5S)-5-(3-(5-(((2R,3R,4R,5R,6R)- 3-acetamido-4,5-dihydroxy-6-(hydroxymethyl)tetrahydro-2H-py ran-2-yl)oxy)pentanamido)propyl)-2-((hydroxyl)methyl)-4-met hoxytetrahydrofuran-3-oxyl
ggtctggcttatacatctta

SEQ ID NO: 972 - RNA, 20 nt, synthetic construct
  source 1..20: mol_type = other RNA
  modified_base 1: mod_base = OTHER; note = 2'-O-methyl-cytidine with phosphorothioate linkage
  modified_base 2: mod_base = OTHER; note = 2'-O-methyl-adenosine with phosphorothioate linkage
  modified_base 3: mod_base = OTHER; note = 2'-O-methyl-guanosine
  modified_base 4: mod_base = OTHER; note = 2'-O-methyl-uridine
  modified_base 5: mod_base = OTHER; note = 2'-O-methyl-uridine
  modified_base 6: mod_base = OTHER; note = 2'-fluoro-uridine
  modified_base 7: mod_base = OTHER; note = 2'-O-methyl-uridine
  modified_base 8: mod_base = OTHER; note = 2'-fluoro-cytidine
  modified_base 9: mod_base = OTHER; note = 2'-fluoro-adenosine
  modified_base 10: mod_base = OTHER; note = 2'-fluoro-uridine
  modified_base 11: mod_base = OTHER; note = 2'-fluoro-uridine
  modified_base 12: mod_base = OTHER; note = 2'-O-methyl-cytidine
  modified_base 13: mod_base = OTHER; note = 2'-O-methyl-uridine
  modified_base 14: mod_base = OTHER; note = 2'-O-methyl-adenosine
  modified_base 15: mod_base = OTHER; note = 2'-O-methyl-uridine
  modified_base 16: mod_base = OTHER; note = 2'-O-methyl-guanosine
  modified_base 17: mod_base = OTHER; note = 2'-O-methyl-cytidine
  modified_base 18: mod_base = OTHER; note = 2'-O-methyl-adenosine with phosphorothioate linkage
  modified_base 19: mod_base = OTHER; note = 2'-O-methyl-uridine with phosphorothioate linkage
  modified_base 20: mod_base = OTHER; note = 2'-O-methyl-adenosine conjugated to 3 iterations of (2R,3R,4R,5S)-5-(3-(5-(((2R,3R,4R,5R,6R)- 3-acetamido-4,5-dihydroxy-6-(hydroxymethyl)tetrahydro-2H-py ran-2-yl)oxy)pentanamido)propyl)-2-((hydroxyl)methyl)-4-met hoxytetrahydrofuran-3-oxyl
cagttttcattctatgcata

SEQ ID NO: 973 - RNA, 20 nt, synthetic construct
  source 1..20: mol_type = other RNA
  modified_base 1: mod_base = OTHER; note = 2'-O-methyl-cytidine with phosphorothioate linkage
  modified_base 2: mod_base = OTHER; note = 2'-O-methyl-uridine with phosphorothioate linkage
  modified_base 3: mod_base = OTHER; note = 2'-O-methyl-adenosine
  modified_base 4: mod_base = OTHER; note = 2'-O-methyl-uridine
  modified_base 5: mod_base = OTHER; note = 2'-O-methyl-guanosine
  modified_base 6: mod_base = OTHER; note = 2'-fluoro-cytidine
  modified_base 7: mod_base = OTHER; note = 2'-O-methyl-adenosine
  modified_base 8: mod_base = OTHER; note = 2'-fluoro-uridine
  modified_base 9: mod_base = OTHER; note = 2'-fluoro-guanosine
  modified_base 10: mod_base = OTHER; note = 2'-fluoro-guanosine
  modified_base 11: mod_base = OTHER; note = 2'-fluoro-adenosine
  modified_base 12: mod_base = OTHER; note = 2'-O-methyl-guanosine
  modified_base 13: mod_base = OTHER; note = 2'-O-methyl-cytidine
  modified_base 14: mod_base = OTHER; note = 2'-O-methyl-uridine
  modified_base 15: mod_base = OTHER; note = 2'-O-methyl-adenosine
  modified_base 16: mod_base = OTHER; note = 2'-O-methyl-adenosine
  modified_base 17: mod_base = OTHER; note = 2'-O-methyl-uridine
  modified_base 18: mod_base = OTHER; note = 2'-O-methyl-uridine with phosphorothioate linkage
  modified_base 19: mod_base = OTHER; note = 2'-O-methyl-adenosine with phosphorothioate linkage
  modified_base 20: mod_base = OTHER; note = 2'-O-methyl-adenosine conjugated to 3 iterations of (2R,3R,4R,5S)-5-(3-(5-(((2R,3R,4R,5R,6R)- 3-acetamido-4,5-dihydroxy-6-(hydroxymethyl)tetrahydro-2H-py ran-2-yl)oxy)pentanamido)propyl)-2-((hydroxyl)methyl)-4-met hoxytetrahydrofuran-3-oxyl
ctatgcatggagctaattaa

SEQ ID NO: 974 - RNA, 20 nt, synthetic construct
  source 1..20: mol_type = other RNA
  modified_base 1: mod_base = OTHER; note = 2'-O-methyl-guanosine with phosphorothioate linkage
  modified_base 2: mod_base = OTHER; note = 2'-O-methyl-cytidine with phosphorothioate linkage
  modified_base 3: mod_base = OTHER; note = 2'-O-methyl-adenosine
  modified_base 4: mod_base = OTHER; note = 2'-O-methyl-uridine
  modified_base 5: mod_base = OTHER; note = 2'-O-methyl-guanosine
  modified_base 6: mod_base = OTHER; note = 2'-fluoro-guanosine
  modified_base 7: mod_base = OTHER; note = 2'-O-methyl-adenosine
  modified_base 8: mod_base = OTHER; note = 2'-fluoro-guanosine
  modified_base 9: mod_base = OTHER; note = 2'-fluoro-cytidine
  modified_base 10: mod_base = OTHER; note = 2'-fluoro-uridine
  modified_base 11: mod_base = OTHER; note = 2'-fluoro-adenosine
  modified_base 12: mod_base = OTHER; note = 2'-O-methyl-adenosine
  modified_base 13: mod_base = OTHER; note = 2'-O-methyl-uridine
  modified_base 14: mod_base = OTHER; note = 2'-O-methyl-uridine
  modified_base 15: mod_base = OTHER; note = 2'-O-methyl-adenosine
  modified_base 16: mod_base = OTHER; note = 2'-O-methyl-cytidine
  modified_base 17: mod_base = OTHER; note = 2'-O-methyl-uridine
  modified_base 18: mod_base = OTHER; note = 2'-O-methyl-guanosine with phosphorothioate linkage
  modified_base 19: mod_base = OTHER; note = 2'-O-methyl-adenosine with phosphorothioate linkage
  modified_base 20: mod_base = OTHER; note = 2'-O-methyl-adenosine conjugated to 3 iterations of (2R,3R,4R,5S)-5-(3-(5-(((2R,3R,4R,5R,6R)- 3-acetamido-4,5-dihydroxy-6-(hydroxymethyl)tetrahydro-2H-py ran-2-yl)oxy)pentanamido)propyl)-2-((hydroxyl)methyl)-4-met hoxytetrahydrofuran-3-oxyl
gcatggagctaattactgaa

SEQ ID NO: 975 - RNA, 20 nt, synthetic construct
  source 1..20: mol_type = other RNA
  modified_base 1: mod_base = OTHER; note = 2'-O-methyl-guanosine with phosphorothioate linkage
  modified_base 2: mod_base = OTHER; note = 2'-O-methyl-guanosine with phosphorothioate linkage
  modified_base 3: mod_base = OTHER; note = 2'-O-methyl-adenosine
  modified_base 4: mod_base = OTHER; note = 2'-O-methyl-guanosine
  modified_base 5: mod_base = OTHER; note = 2'-O-methyl-cytidine
  modified_base 6: mod_base = OTHER; note = 2'-fluoro-uridine
  modified_base 7: mod_base = OTHER; note = 2'-O-methyl-adenosine
  modified_base 8: mod_base = OTHER; note = 2'-fluoro-adenosine
  modified_base 9: mod_base = OTHER; note = 2'-fluoro-uridine
  modified_base 10: mod_base = OTHER; note = 2'-fluoro-uridine
  modified_base 11: mod_base = OTHER; note = 2'-fluoro-adenosine
  modified_base 12: mod_base = OTHER; note = 2'-O-methyl-cytidine
  modified_base 13: mod_base = OTHER; note = 2'-O-methyl-uridine
  modified_base 14: mod_base = OTHER; note = 2'-O-methyl-guanosine
  modified_base 15: mod_base = OTHER; note = 2'-O-methyl-adenosine
  modified_base 16: mod_base = OTHER; note = 2'-O-methyl-cytidine
  modified_base 17: mod_base = OTHER; note = 2'-O-methyl-uridine
  modified_base 18: mod_base = OTHER; note = 2'-O-methyl-uridine with phosphorothioate linkage
  modified_base 19: mod_base = OTHER; note = 2'-O-methyl-uridine with phosphorothioate linkage
  modified_base 20: mod_base = OTHER; note = 2'-O-methyl-adenosine conjugated to 3 iterations of (2R,3R,4R,5S)-5-(3-(5-(((2R,3R,4R,5R,6R)- 3-acetamido-4,5-dihydroxy-6-(hydroxymethyl)tetrahydro-2H-py ran-2-yl)oxy)pentanamido)propyl)-2-((hydroxyl)methyl)-4-met hoxytetrahydrofuran-3-oxyl
ggagctaattactgacttta

SEQ ID NO: 976 - RNA, 20 nt, synthetic construct
  source 1..20: mol_type = other RNA
  modified_base 1: mod_base = OTHER; note = 2'-O-methyl-cytidine with phosphorothioate linkage
  modified_base 2: mod_base = OTHER; note = 2'-O-methyl-uridine with phosphorothioate linkage
  modified_base 3: mod_base = OTHER; note = 2'-O-methyl-uridine
  modified_base 4: mod_base = OTHER; note = 2'-O-methyl-cytidine
  modified_base 5: mod_base = OTHER; note = 2'-O-methyl-cytidine
  modified_base 6: mod_base = OTHER; note = 2'-fluoro-adenosine
  modified_base 7: mod_base = OTHER; note = 2'-O-methyl-uridine
  modified_base 8: mod_base = OTHER; note = 2'-fluoro-adenosine
  modified_base 9: mod_base = OTHER; note = 2'-fluoro-guanosine
  modified_base 10: mod_base = OTHER; note = 2'-fluoro-guanosine
  modified_base 11: mod_base = OTHER; note = 2'-fluoro-cytidine
  modified_base 12: mod_base = OTHER; note = 2'-O-methyl-uridine
  modified_base 13: mod_base = OTHER; note = 2'-O-methyl-adenosine
  modified_base 14: mod_base = OTHER; note = 2'-O-methyl-adenosine
  modified_base 15: mod_base = OTHER; note = 2'-O-methyl-adenosine
  modified_base 16: mod_base = OTHER; note = 2'-O-methyl-uridine
  modified_base 17: mod_base = OTHER; note = 2'-O-methyl-adenosine
  modified_base 18: mod_base = OTHER; note = 2'-O-methyl-adenosine with phosphorothioate linkage
  modified_base 19: mod_base = OTHER; note = 2'-O-methyl-uridine with phosphorothioate linkage
  modified_base 20: mod_base = OTHER; note = 2'-O-methyl-adenosine conjugated to 3 iterations of (2R,3R,4R,5S)-5-(3-(5-(((2R,3R,4R,5R,6R)- 3-acetamido-4,5-dihydroxy-6-(hydroxymethyl)tetrahydro-2H-py ran-2-yl)oxy)pentanamido)propyl)-2-((hydroxyl)methyl)-4-met hoxytetrahydrofuran-3-oxyl
cttccataggctaaataata

SEQ ID NO: 977 - RNA, 20 nt, synthetic construct
  source 1..20: mol_type = other RNA
  modified_base 1: mod_base = OTHER; note = 2'-O-methyl-guanosine with phosphorothioate linkage
  modified_base 2: mod_base = OTHER; note = 2'-O-methyl-uridine with phosphorothioate linkage
  modified_base 3: mod_base = OTHER; note = 2'-O-methyl-adenosine
  modified_base 4: mod_base = OTHER; note = 2'-O-methyl-uridine
  modified_base 5: mod_base = OTHER; note = 2'-O-methyl-cytidine
  modified_base 6: mod_base = OTHER; note = 2'-fluoro-uridine
  modified_base 7: mod_base = OTHER; note = 2'-O-methyl-guanosine
  modified_base 8: mod_base = OTHER; note = 2'-fluoro-adenosine
  modified_base 9: mod_base = OTHER; note = 2'-fluoro-guanosine
  modified_base 10: mod_base = OTHER; note = 2'-fluoro-cytidine
  modified_base 11: mod_base = OTHER; note = 2'-fluoro-cytidine
  modified_base 12: mod_base = OTHER; note = 2'-O-methyl-adenosine
  modified_base 13: mod_base = OTHER; note = 2'-O-methyl-adenosine
  modified_base 14: mod_base = OTHER; note = 2'-O-methyl-adenosine
  modified_base 15: mod_base = OTHER; note = 2'-O-methyl-adenosine
  modified_base 16: mod_base = OTHER; note = 2'-O-methyl-uridine
  modified_base 17: mod_base = OTHER; note = 2'-O-methyl-adenosine
  modified_base 18: mod_base = OTHER; note = 2'-O-methyl-uridine with phosphorothioate linkage
  modified_base 19: mod_base = OTHER; note = 2'-O-methyl-uridine with phosphorothioate linkage
  modified_base 20: mod_base = OTHER; note = 2'-O-methyl-adenosine conjugated to 3 iterations of (2R,3R,4R,5S)-5-(3-(5-(((2R,3R,4R,5R,6R)- 3-acetamido-4,5-dihydroxy-6-(hydroxymethyl)tetrahydro-2H-py ran-2-yl)oxy)pentanamido)propyl)-2-((hydroxyl)methyl)-4-met hoxytetrahydrofuran-3-oxyl
gtatctgagccaaaatatta

SEQ ID NO: 978 - RNA, 20 nt, synthetic construct
  source 1..20: mol_type = other RNA
  modified_base 1: mod_base = OTHER; note = 2'-O-methyl-guanosine with phosphorothioate linkage
  modified_base 2: mod_base = OTHER; note = 2'-O-methyl-guanosine with phosphorothioate linkage
  modified_base 3: mod_base = OTHER; note = 2'-O-methyl-adenosine
  modified_base 4: mod_base = OTHER; note = 2'-O-methyl-guanosine
  modified_base 5: mod_base = OTHER; note = 2'-O-methyl-adenosine
  modified_base 6: mod_base = OTHER; note = 2'-fluoro-adenosine
  modified_base 7: mod_base = OTHER; note = 2'-O-methyl-guanosine
  modified_base 8: mod_base = OTHER; note = 2'-fluoro-adenosine
  modified_base 9: mod_base = OTHER; note = 2'-fluoro-uridine
  modified_base 10: mod_base = OTHER; note = 2'-fluoro-uridine
  modified_base 11: mod_base = OTHER; note = 2'-fluoro-adenosine
  modified_base 12: mod_base = OTHER; note = 2'-O-methyl-uridine
  modified_base 13: mod_base = OTHER; note = 2'-O-methyl-uridine
  modified_base 14: mod_base = OTHER; note = 2'-O-methyl-cytidine
  modified_base 15: mod_base = OTHER; note = 2'-O-methyl-adenosine
  modified_base 16: mod_base = OTHER; note = 2'-O-methyl-adenosine
  modified_base 17: mod_base = OTHER; note = 2'-O-methyl-adenosine
  modified_base 18: mod_base = OTHER; note = 2'-O-methyl-cytidine with phosphorothioate linkage
  modified_base 19: mod_base = OTHER; note = 2'-O-methyl-uridine with phosphorothioate linkage
  modified_base 20: mod_base = OTHER; note = 2'-O-methyl-adenosine conjugated to 3 iterations of (2R,3R,4R,5S)-5-(3-(5-(((2R,3R,4R,5R,6R)- 3-acetamido-4,5-dihydroxy-6-(hydroxymethyl)tetrahydro-2H-py ran-2-yl)oxy)pentanamido)propyl)-2-((hydroxyl)methyl)-4-met hoxytetrahydrofuran-3-oxyl
ggagaagattattcaaacta

SEQ ID NO: 979 - RNA, 20 nt, synthetic construct
  source 1..20: mol_type = other RNA
  modified_base 1: mod_base = OTHER; note = 2'-O-methyl-guanosine with phosphorothioate linkage
  modified_base 2: mod_base = OTHER; note = 2'-O-methyl-guanosine with phosphorothioate linkage
  modified_base 3: mod_base = OTHER; note = 2'-O-methyl-adenosine
  modified_base 4: mod_base = OTHER; note = 2'-O-methyl-adenosine
  modified_base 5: mod_base = OTHER; note = 2'-O-methyl-uridine
  modified_base 6: mod_base = OTHER; note = 2'-fluoro-uridine
  modified_base 7: mod_base = OTHER; note = 2'-O-methyl-uridine
  modified_base 8: mod_base = OTHER; note = 2'-fluoro-uridine
  modified_base 9: mod_base = OTHER; note = 2'-fluoro-guanosine
  modified_base 10: mod_base = OTHER; note = 2'-fluoro-guanosine
  modified_base 11: mod_base = OTHER; note = 2'-fluoro-adenosine
  modified_base 12: mod_base = OTHER; note = 2'-O-methyl-uridine
  modified_base 13: mod_base = OTHER; note = 2'-O-methyl-uridine
  modified_base 14: mod_base = OTHER; note = 2'-O-methyl-guanosine
  modified_base 15: mod_base = OTHER; note = 2'-O-methyl-adenosine
  modified_base 16: mod_base = OTHER; note = 2'-O-methyl-cytidine
  modified_base 17: mod_base = OTHER; note = 2'-O-methyl-uridine
  modified_base 18: mod_base = OTHER; note = 2'-O-methyl-uridine with phosphorothioate linkage
  modified_base 19: mod_base = OTHER; note = 2'-O-methyl-uridine with phosphorothioate linkage
  modified_base 20: mod_base = OTHER; note = 2'-O-methyl-adenosine conjugated to 3 iterations of (2R,3R,4R,5S)-5-(3-(5-(((2R,3R,4R,5R,6R)- 3-acetamido-4,5-dihydroxy-6-(hydroxymethyl)tetrahydro-2H-py ran-2-yl)oxy)pentanamido)propyl)-2-((hydroxyl)methyl)-4-met hoxytetrahydrofuran-3-oxyl
ggaattttggattgacttta

SEQ ID NO: 980 - RNA, 20 nt, synthetic construct
  source 1..20: mol_type = other RNA
  modified_base 1: mod_base = OTHER; note = 2'-O-methyl-guanosine with phosphorothioate linkage
  modified_base 2: mod_base = OTHER; note = 2'-O-methyl-adenosine with phosphorothioate linkage
  modified_base 3: mod_base = OTHER; note = 2'-O-methyl-uridine
  modified_base 4: mod_base = OTHER; note = 2'-O-methyl-uridine
  modified_base 5: mod_base = OTHER; note = 2'-O-methyl-guanosine
  modified_base 6: mod_base = OTHER; note = 2'-fluoro-adenosine
  modified_base 7: mod_base = OTHER; note = 2'-O-methyl-cytidine
  modified_base 8: mod_base = OTHER; note = 2'-fluoro-uridine
  modified_base 9: mod_base = OTHER; note = 2'-fluoro-uridine
  modified_base 10: mod_base = OTHER; note = 2'-fluoro-uridine
  modified_base 11: mod_base = OTHER; note = 2'-fluoro-cytidine
  modified_base 12: mod_base = OTHER; note = 2'-O-methyl-adenosine
  modified_base 13: mod_base = OTHER; note = 2'-O-methyl-adenosine
  modified_base 14: mod_base = OTHER; note = 2'-O-methyl-adenosine
  modified_base 15: mod_base = OTHER; note = 2'-O-methyl-guanosine
  modified_base 16: mod_base = OTHER; note = 2'-O-methyl-uridine
  modified_base 17: mod_base = OTHER; note = 2'-O-methyl-adenosine
  modified_base 18: mod_base = OTHER; note = 2'-O-methyl-cytidine with phosphorothioate linkage
  modified_base 19: mod_base = OTHER; note = 2'-O-methyl-uridine with phosphorothioate linkage
  modified_base 20: mod_base = OTHER; note = 2'-O-methyl-adenosine conjugated to 3 iterations of (2R,3R,4R,5S)-5-(3-(5-(((2R,3R,4R,5R,6R)- 3-acetamido-4,5-dihydroxy-6-(hydroxymethyl)tetrahydro-2H-py ran-2-yl)oxy)pentanamido)propyl)-2-((hydroxyl)methyl)-4-met hoxytetrahydrofuran-3-oxyl
gattgactttcaaagtacta

SEQ ID NO: 981 - RNA, 20 nt, synthetic construct
  source 1..20: mol_type = other RNA
  modified_base 1: mod_base = OTHER; note = 2'-O-methyl-cytidine with phosphorothioate linkage
  modified_base 2: mod_base = OTHER; note = 2'-O-methyl-guanosine with phosphorothioate linkage
  modified_base 3: mod_base = OTHER; note = 2'-O-methyl-uridine
  modified_base 4: mod_base = OTHER; note = 2'-O-methyl-guanosine
  modified_base 5: mod_base = OTHER; note = 2'-O-methyl-adenosine
  modified_base 6: mod_base = OTHER; note = 2'-fluoro-cytidine
  modified_base 7: mod_base = OTHER; note = 2'-O-methyl-uridine
  modified_base 8: mod_base = OTHER; note = 2'-fluoro-cytidine
  modified_base 9: mod_base = OTHER; note = 2'-fluoro-uridine
  modified_base 10: mod_base = OTHER; note = 2'-fluoro-uridine
  modified_base 11: mod_base = OTHER; note = 2'-fluoro-cytidine
  modified_base 12: mod_base = OTHER; note = 2'-O-methyl-uridine
  modified_base 13: mod_base = OTHER; note = 2'-O-methyl-uridine
  modified_base 14: mod_base = OTHER; note = 2'-O-methyl-adenosine
  modified_base 15: mod_base = OTHER; note = 2'-O-methyl-uridine
  modified_base 16: mod_base = OTHER; note = 2'-O-methyl-adenosine
  modified_base 17: mod_base = OTHER; note = 2'-O-methyl-cytidine
  modified_base 18: mod_base = OTHER; note = 2'-O-methyl-cytidine with phosphorothioate linkage
  modified_base 19: mod_base = OTHER; note = 2'-O-methyl-uridine with phosphorothioate linkage
  modified_base 20: mod_base = OTHER; note = 2'-O-methyl-adenosine conjugated to 3 iterations of (2R,3R,4R,5S)-5-(3-(5-(((2R,3R,4R,5R,6R)- 3-acetamido-4,5-dihydroxy-6-(hydroxymethyl)tetrahydro-2H-py ran-2-yl)oxy)pentanamido)propyl)-2-((hydroxyl)methyl)-4-met hoxytetrahydrofuran-3-oxyl
cgtgactcttcttataccta

SEQ ID NO: 982 - RNA, 20 nt, synthetic construct
  source 1..20: mol_type = other RNA
  modified_base 1: mod_base = OTHER; note = 2'-O-methyl-guanosine with phosphorothioate linkage
  modified_base 2: mod_base = OTHER; note = 2'-O-methyl-uridine with phosphorothioate linkage
  modified_base 3: mod_base = OTHER; note = 2'-O-methyl-guanosine
  modified_base 4: mod_base = OTHER; note = 2'-O-methyl-adenosine
  modified_base 5: mod_base = OTHER; note = 2'-O-methyl-cytidine
  modified_base 6: mod_base = OTHER; note = 2'-fluoro-uridine
  modified_base 7: mod_base = OTHER; note = 2'-O-methyl-cytidine
  modified_base 8: mod_base = OTHER; note = 2'-fluoro-uridine
  modified_base 9: mod_base = OTHER; note = 2'-fluoro-uridine
  modified_base 10: mod_base = OTHER; note = 2'-fluoro-cytidine
  modified_base 11: mod_base = OTHER; note = 2'-fluoro-uridine
  modified_base 12: mod_base = OTHER; note = 2'-O-methyl-uridine
  modified_base 13: mod_base = OTHER; note = 2'-O-methyl-adenosine
  modified_base 14: mod_base = OTHER; note = 2'-O-methyl-uridine
  modified_base 15: mod_base = OTHER; note = 2'-O-methyl-adenosine
  modified_base 16: mod_base = OTHER; note = 2'-O-methyl-cytidine
  modified_base 17: mod_base = OTHER; note = 2'-O-methyl-cytidine
  modified_base 18: mod_base = OTHER; note = 2'-O-methyl-uridine with phosphorothioate linkage
  modified_base 19: mod_base = OTHER; note = 2'-O-methyl-adenosine with phosphorothioate linkage
  modified_base 20: mod_base = OTHER; note = 2'-O-methyl-adenosine conjugated to 3 iterations of (2R,3R,4R,5S)-5-(3-(5-(((2R,3R,4R,5R,6R)- 3-acetamido-4,5-dihydroxy-6-(hydroxymethyl)tetrahydro-2H-py ran-2-yl)oxy)pentanamido)propyl)-2-((hydroxyl)methyl)-4-met hoxytetrahydrofuran-3-oxyl
gtgactcttcttatacctaa

SEQ ID NO: 983 - RNA, 20 nt, synthetic construct
  source 1..20: mol_type = other RNA
  modified_base 1: mod_base = OTHER; note = 2'-O-methyl-guanosine with phosphorothioate linkage
  modified_base 2: mod_base = OTHER; note = 2'-O-methyl-cytidine with phosphorothioate linkage
  modified_base 3: mod_base = OTHER; note = 2'-O-methyl-adenosine
  modified_base 4: mod_base = OTHER; note = 2'-O-methyl-adenosine
  modified_base 5: mod_base = OTHER; note = 2'-O-methyl-adenosine
  modified_base 6: mod_base = OTHER; note = 2'-fluoro-adenosine
  modified_base 7: mod_base = OTHER; note = 2'-O-methyl-cytidine
  modified_base 8: mod_base = OTHER; note = 2'-fluoro-adenosine
  modified_base 9: mod_base = OTHER; note = 2'-fluoro-uridine
  modified_base 10: mod_base = OTHER; note = 2'-fluoro-guanosine
  modified_base 11: mod_base = OTHER; note = 2'-fluoro-cytidine
  modified_base 12: mod_base = OTHER; note = 2'-O-methyl-cytidine
  modified_base 13: mod_base = OTHER; note = 2'-O-methyl-uridine
  modified_base 14: mod_base = OTHER; note = 2'-O-methyl-uridine
  modified_base 15: mod_base = OTHER; note = 2'-O-methyl-guanosine
  modified_base 16: mod_base = OTHER; note = 2'-O-methyl-adenosine
  modified_base 17: mod_base = OTHER; note = 2'-O-methyl-adenosine
  modified_base 18: mod_base = OTHER; note = 2'-O-methyl-cytidine with phosphorothioate linkage
  modified_base 19: mod_base = OTHER; note = 2'-O-methyl-uridine with phosphorothioate linkage
  modified_base 20: mod_base = OTHER; note = 2'-O-methyl-adenosine conjugated to 3 iterations of (2R,3R,4R,5S)-5-(3-(5-(((2R,3R,4R,5R,6R)- 3-acetamido-4,5-dihydroxy-6-(hydroxymethyl)tetrahydro-2H-py ran-2-yl)oxy)pentanamido)propyl)-2-((hydroxyl)methyl)-4-met hoxytetrahydrofuran-3-oxyl
gcaaaacatgccttgaacta

SEQ ID NO: 984 - RNA, 20 nt, synthetic construct
  source 1..20: mol_type = other RNA
  modified_base 1: mod_base = OTHER; note = 2'-O-methyl-cytidine with phosphorothioate linkage
  modified_base 2: mod_base = OTHER; note = 2'-O-methyl-uridine with phosphorothioate linkage
  modified_base 3: mod_base = OTHER; note = 2'-O-methyl-cytidine
  modified_base 4: mod_base = OTHER; note = 2'-O-methyl-uridine
  modified_base 5: mod_base = OTHER; note = 2'-O-methyl-uridine
  modified_base 6: mod_base = OTHER; note = 2'-fluoro-guanosine
  modified_base 7: mod_base = OTHER; note = 2'-O-methyl-adenosine
  modified_base 8: mod_base = OTHER; note = 2'-fluoro-adenosine
  modified_base 9: mod_base = OTHER; note = 2'-fluoro-cytidine
  modified_base 10: mod_base = OTHER; note = 2'-fluoro-uridine
  modified_base 11: mod_base = OTHER; note = 2'-fluoro-adenosine
  modified_base 12: mod_base = OTHER; note = 2'-O-methyl-cytidine
  modified_base 13: mod_base = OTHER; note = 2'-O-methyl-uridine
  modified_base 14: mod_base = OTHER; note = 2'-O-methyl-guanosine
  modified_base 15: mod_base = OTHER; note = 2'-O-methyl-uridine
  modified_base 16: mod_base = OTHER; note = 2'-O-methyl-guanosine
  modified_base 17: mod_base = OTHER; note = 2'-O-methyl-adenosine
  modified_base 18: mod_base = OTHER; note = 2'-O-methyl-adenosine with phosphorothioate linkage
  modified_base 19: mod_base = OTHER; note = 2'-O-methyl-adenosine with phosphorothioate linkage
  modified_base 20: mod_base = OTHER; note = 2'-O-methyl-adenosine conjugated to 3 iterations of (2R,3R,4R,5S)-5-(3-(5-(((2R,3R,4R,5R,6R)- 3-acetamido-4,5-dihydroxy-6-(hydroxymethyl)tetrahydro-2H-py ran-2-yl)oxy)pentanamido)propyl)-2-((hydroxyl)methyl)-4-met hoxytetrahydrofuran-3-oxyl
ctcttgaactactgtgaaaa

SEQ ID NO: 985 - RNA, 20 nt, synthetic construct
  source 1..20: mol_type = other RNA
  modified_base 1: mod_base = OTHER; note = 2'-O-methyl-guanosine with phosphorothioate linkage
  modified_base 2: mod_base = OTHER; note = 2'-O-methyl-adenosine with phosphorothioate linkage
  modified_base 3: mod_base = OTHER; note = 2'-O-methyl-adenosine
  modified_base 4: mod_base = OTHER; note = 2'-O-methyl-cytidine
  modified_base 5: mod_base = OTHER; note = 2'-O-methyl-uridine
  modified_base 6: mod_base = OTHER; note = 2'-fluoro-adenosine
  modified_base 7: mod_base = OTHER; note = 2'-O-methyl-cytidine
  modified_base 8: mod_base = OTHER; note = 2'-fluoro-uridine
  modified_base 9: mod_base = OTHER; note = 2'-fluoro-guanosine
  modified_base 10: mod_base = OTHER; note = 2'-fluoro-uridine
  modified_base 11: mod_base = OTHER; note = 2'-fluoro-guanosine
  modified_base 12: mod_base = OTHER; note = 2'-O-methyl-adenosine
  modified_base 13: mod_base = OTHER; note = 2'-O-methyl-adenosine
  modified_base 14: mod_base = OTHER; note = 2'-O-methyl-adenosine
  modified_base 15: mod_base = OTHER; note = 2'-O-methyl-adenosine
  modified_base 16: mod_base = OTHER; note = 2'-O-methyl-guanosine
  modified_base 17: mod_base = OTHER; note = 2'-O-methyl-adenosine
  modified_base 18: mod_base = OTHER; note = 2'-O-methyl-adenosine with phosphorothioate linkage
  modified_base 19: mod_base = OTHER; note = 2'-O-methyl-uridine with phosphorothioate linkage
  modified_base 20: mod_base = OTHER; note = 2'-O-methyl-adenosine conjugated to 3 iterations of (2R,3R,4R,5S)-5-(3-(5-(((2R,3R,4R,5R,6R)- 3-acetamido-4,5-dihydroxy-6-(hydroxymethyl)tetrahydro-2H-py ran-2-yl)oxy)pentanamido)propyl)-2-((hydroxyl)methyl)-4-met hoxytetrahydrofuran-3-oxyl
gaactactgtgaaaagaata

SEQ ID NO: 986 - RNA, 20 nt, synthetic construct
  source 1..20: mol_type = other RNA
  modified_base 1: mod_base = OTHER; note = 2'-O-methyl-guanosine with phosphorothioate linkage
  modified_base 2: mod_base = OTHER; note = 2'-O-methyl-adenosine with phosphorothioate linkage
  modified_base 3: mod_base = OTHER; note = 2'-O-methyl-adenosine
  modified_base 4: mod_base = OTHER; note = 2'-O-methyl-adenosine
  modified_base 5: mod_base = OTHER; note = 2'-O-methyl-adenosine
  modified_base 6: mod_base = OTHER; note = 2'-fluoro-guanosine
  modified_base 7: mod_base = OTHER; note = 2'-O-methyl-adenosine
  modified_base 8: mod_base = OTHER; note = 2'-fluoro-adenosine
  modified_base 9: mod_base = OTHER; note = 2'-fluoro-uridine
  modified_base 10: mod_base = OTHER; note = 2'-fluoro-cytidine
  modified_base 11: mod_base = OTHER; note = 2'-fluoro-adenosine
  modified_base 12: mod_base = OTHER; note = 2'-O-methyl-cytidine
  modified_base 13: mod_base = OTHER; note = 2'-O-methyl-cytidine
  modified_base 14: mod_base = OTHER; note = 2'-O-methyl-guanosine
  modified_base 15: mod_base = OTHER; note = 2'-O-methyl-uridine
  modified_base 16: mod_base = OTHER; note = 2'-O-methyl-uridine
  modified_base 17: mod_base = OTHER; note = 2'-O-methyl-guanosine
  modified_base 18: mod_base = OTHER; note = 2'-O-methyl-uridine with phosphorothioate linkage
  modified_base 19: mod_base = OTHER; note = 2'-O-methyl-adenosine with phosphorothioate linkage
  modified_base 20: mod_base = OTHER; note = 2'-O-methyl-adenosine conjugated to 3 iterations of (2R,3R,4R,5S)-5-(3-(5-(((2R,3R,4R,5R,6R)- 3-acetamido-4,5-dihydroxy-6-(hydroxymethyl)tetrahydro-2H-py ran-2-yl)oxy)pentanamido)propyl)-2-((hydroxyl)methyl)-4-met hoxytetrahydrofuran-3-oxyl
gaaaagaatcaccgttgtaa

SEQ ID NO: 987 - RNA, 20 nt, synthetic construct
  source 1..20: mol_type = other RNA
  modified_base 1: mod_base = OTHER; note = 2'-O-methyl-cytidine with phosphorothioate linkage
  modified_base 2: mod_base = OTHER; note = 2'-O-methyl-adenosine with phosphorothioate linkage
  modified_base 3: mod_base = OTHER; note = 2'-O-methyl-cytidine
  modified_base 4: mod_base = OTHER; note = 2'-O-methyl-cytidine
  modified_base 5: mod_base = OTHER; note = 2'-O-methyl-guanosine
  modified_base 6: mod_base = OTHER; note = 2'-fluoro-uridine
  modified_base 7: mod_base = OTHER; note = 2'-O-methyl-uridine
  modified_base 8: mod_base = OTHER; note = 2'-fluoro-guanosine
  modified_base 9: mod_base = OTHER; note = 2'-fluoro-uridine
  modified_base 10: mod_base = OTHER; note = 2'-fluoro-adenosine
  modified_base 11: mod_base = OTHER; note = 2'-fluoro-adenosine
  modified_base 12: mod_base = OTHER; note = 2'-O-methyl-adenosine
  modified_base 13: mod_base = OTHER; note = 2'-O-methyl-guanosine
  modified_base 14: mod_base = OTHER; note = 2'-O-methyl-adenosine
  modified_base 15: mod_base = OTHER; note = 2'-O-methyl-cytidine
  modified_base 16: mod_base = OTHER; note = 2'-O-methyl-uridine
  modified_base 17: mod_base = OTHER; note = 2'-O-methyl-uridine
  modified_base 18: mod_base = OTHER; note = 2'-O-methyl-uridine with phosphorothioate linkage
  modified_base 19: mod_base = OTHER; note = 2'-O-methyl-uridine with phosphorothioate linkage
  modified_base 20: mod_base = OTHER; note = 2'-O-methyl-adenosine conjugated to 3 iterations of (2R,3R,4R,5S)-5-(3-(5-(((2R,3R,4R,5R,6R)- 3-acetamido-4,5-dihydroxy-6-(hydroxymethyl)tetrahydro-2H-py ran-2-yl)oxy)pentanamido)propyl)-2-((hydroxyl)methyl)-4-met hoxytetrahydrofuran-3-oxyl
caccgttgtaaagactttta

SEQ ID NO: 988 - RNA, 20 nt, synthetic construct
  source 1..20: mol_type = other RNA
  modified_base 1: mod_base = OTHER; note = 2'-O-methyl-guanosine with phosphorothioate linkage
  modified_base 2: mod_base = OTHER; note = 2'-O-methyl-uridine with phosphorothioate linkage
  modified_base 3: mod_base = OTHER; note = 2'-O-methyl-adenosine
  modified_base 4: mod_base = OTHER; note = 2'-O-methyl-adenosine
  modified_base 5: mod_base = OTHER; note = 2'-O-methyl-guanosine
  modified_base 6: mod_base = OTHER; note = 2'-fluoro-cytidine
  modified_base 7: mod_base = OTHER; note = 2'-O-methyl-uridine
  modified_base 8: mod_base = OTHER; note = 2'-fluoro-adenosine
  modified_base 9: mod_base = OTHER; note = 2'-fluoro-guanosine
  modified_base 10: mod_base = OTHER; note = 2'-fluoro-cytidine
  modified_base 11: mod_base = OTHER; note = 2'-fluoro-uridine
  modified_base 12: mod_base = OTHER; note = 2'-O-methyl-guanosine
  modified_base 13: mod_base = OTHER; note = 2'-O-methyl-adenosine
  modified_base 14: mod_base = OTHER; note = 2'-O-methyl-uridine
  modified_base 15: mod_base = OTHER; note = 2'-O-methyl-adenosine
  modified_base 16: mod_base = OTHER; note = 2'-O-methyl-cytidine
  modified_base 17: mod_base = OTHER; note = 2'-O-methyl-uridine
  modified_base 18: mod_base = OTHER; note = 2'-O-methyl-cytidine with phosphorothioate linkage
  modified_base 19: mod_base = OTHER; note = 2'-O-methyl-uridine with phosphorothioate linkage
  modified_base 20: mod_base = OTHER; note = 2'-O-methyl-adenosine conjugated to 3 iterations of (2R,3R,4R,5S)-5-(3-(5-(((2R,3R,4R,5R,6R)- 3-acetamido-4,5-dihydroxy-6-(hydroxymethyl)tetrahydro-2H-py ran-2-yl)oxy)pentanamido)propyl)-2-((hydroxyl)methyl)-4-met hoxytetrahydrofuran-3-oxyl
gtaagctagctgatactcta

SEQ ID NO: 989 - RNA, 20 nt, synthetic construct
  source 1..20: mol_type = other RNA
  modified_base 1: mod_base = OTHER; note = 2'-O-methyl-cytidine with phosphorothioate linkage
  modified_base 2: mod_base = OTHER; note = 2'-O-methyl-cytidine with phosphorothioate linkage
  modified_base 3: mod_base = OTHER; note = 2'-O-methyl-guanosine
  modified_base 4: mod_base = OTHER; note = 2'-O-methyl-adenosine
  modified_base 5: mod_base = OTHER; note = 2'-O-methyl-cytidine
  modified_base 6: mod_base = OTHER; note = 2'-fluoro-adenosine
  modified_base 7: mod_base = OTHER; note = 2'-O-methyl-guanosine
  modified_base 8: mod_base = OTHER; note = 2'-fluoro-guanosine
  modified_base 9: mod_base = OTHER; note = 2'-fluoro-cytidine
  modified_base 10: mod_base = OTHER; note = 2'-fluoro-cytidine
  modified_base 11: mod_base = OTHER; note = 2'-fluoro-cytidine
  modified_base 12: mod_base = OTHER; note = 2'-O-methyl-adenosine
  modified_base 13: mod_base = OTHER; note = 2'-O-methyl-adenosine
  modified_base 14: mod_base = OTHER; note = 2'-O-methyl-adenosine
  modified_base 15: mod_base = OTHER; note = 2'-O-methyl-guanosine
  modified_base 16: mod_base = OTHER; note = 2'-O-methyl-guanosine
  modified_base 17: mod_base = OTHER; note = 2'-O-methyl-adenosine
  modified_base 18: mod_base = OTHER; note = 2'-O-methyl-adenosine with phosphorothioate linkage
  modified_base 19: mod_base = OTHER; note = 2'-O-methyl-uridine with phosphorothioate linkage
  modified_base 20: mod_base = OTHER; note = 2'-O-methyl-adenosine conjugated to 3 iterations of (2R,3R,4R,5S)-5-(3-(5-(((2R,3R,4R,5R,6R)- 3-acetamido-4,5-dihydroxy-6-(hydroxymethyl)tetrahydro-2H-py ran-2-yl)oxy)pentanamido)propyl)-2-((hydroxyl)methyl)-4-met hoxytetrahydrofuran-3-oxyl
ccgacaggcccaaaggaata

SEQ ID NO: 990 - RNA, 20 nt, synthetic construct
  source 1..20: mol_type = other RNA
  modified_base 1: mod_base = OTHER; note = 2'-O-methyl-guanosine with phosphorothioate linkage
  modified_base 2: mod_base = OTHER; note = 2'-O-methyl-adenosine with phosphorothioate linkage
  modified_base 3: mod_base = OTHER; note = 2'-O-methyl-adenosine
  modified_base 4: mod_base = OTHER; note = 2'-O-methyl-uridine
  modified_base 5: mod_base = OTHER; note = 2'-O-methyl-uridine
  modified_base 6: mod_base = OTHER; note = 2'-fluoro-guanosine
  modified_base 7: mod_base = OTHER; note = 2'-O-methyl-guanosine
  modified_base 8: mod_base = OTHER; note = 2'-fluoro-guanosine
  modified_base 9: mod_base = OTHER; note = 2'-fluoro-cytidine
  modified_base 10: mod_base = OTHER; note = 2'-fluoro-adenosine
  modified_base 11: mod_base = OTHER; note = 2'-fluoro-adenosine
  modified_base 12: mod_base = OTHER; note = 2'-O-methyl-uridine
  modified_base 13: mod_base = OTHER; note = 2'-O-methyl-adenosine
  modified_base 14: mod_base = OTHER; note = 2'-O-methyl-adenosine
  modified_base 15: mod_base = OTHER; note = 2'-O-methyl-adenosine
  modified_base 16: mod_base = OTHER; note = 2'-O-methyl-cytidine
  modified_base 17: mod_base = OTHER; note = 2'-O-methyl-uridine
  modified_base 18: mod_base = OTHER; note = 2'-O-methyl-guanosine with phosphorothioate linkage
  modified_base 19: mod_base = OTHER; note = 2'-O-methyl-uridine with phosphorothioate linkage
  modified_base 20: mod_base = OTHER; note = 2'-O-methyl-adenosine conjugated to 3 iterations of (2R,3R,4R,5S)-5-(3-(5-(((2R,3R,4R,5R,6R)- 3-acetamido-4,5-dihydroxy-6-(hydroxymethyl)tetrahydro-2H-py ran-2-yl)oxy)pentanamido)propyl)-2-((hydroxyl)methyl)-4-met hoxytetrahydrofuran-3-oxyl
gaattgggcaataaactgta

SEQ ID NO: 991 - RNA, 20 nt, synthetic construct
  source 1..20: mol_type = other RNA
  modified_base 1: mod_base = OTHER; note = 2'-O-methyl-guanosine with phosphorothioate linkage
  modified_base 2: mod_base = OTHER; note = 2'-O-methyl-uridine with phosphorothioate linkage
  modified_base 3: mod_base = OTHER; note = 2'-O-methyl-adenosine
  modified_base 4: mod_base = OTHER; note = 2'-O-methyl-guanosine
  modified_base 5: mod_base = OTHER; note = 2'-O-methyl-adenosine
  modified_base 6: mod_base = OTHER; note = 2'-fluoro-uridine
  modified_base 7: mod_base = OTHER; note = 2'-O-methyl-guanosine
  modified_base 8: mod_base = OTHER; note = 2'-fluoro-guanosine
  modified_base 9: mod_base = OTHER; note = 2'-fluoro-adenosine
  modified_base 10: mod_base = OTHER; note = 2'-fluoro-uridine
  modified_base 11: mod_base = OTHER; note = 2'-fluoro-uridine
  modified_base 12: mod_base = OTHER; note = 2'-O-methyl-uridine
  modified_base 13: mod_base = OTHER; note = 2'-O-methyl-uridine
  modified_base 14: mod_base = OTHER; note = 2'-O-methyl-adenosine
  modified_base 15: mod_base = OTHER; note = 2'-O-methyl-guanosine
  modified_base 16: mod_base = OTHER; note = 2'-O-methyl-uridine
  modified_base 17: mod_base = OTHER; note = 2'-O-methyl-adenosine
  modified_base 18: mod_base = OTHER; note = 2'-O-methyl-guanosine with phosphorothioate linkage
  modified_base 19: mod_base = OTHER; note = 2'-O-methyl-uridine with phosphorothioate linkage
  modified_base 20: mod_base = OTHER; note = 2'-O-methyl-adenosine conjugated to 3 iterations of (2R,3R,4R,5S)-5-(3-(5-(((2R,3R,4R,5R,6R)- 3-acetamido-4,5-dihydroxy-6-(hydroxymethyl)tetrahydro-2H-py ran-2-yl)oxy)pentanamido)propyl)-2-((hydroxyl)methyl)-4-met hoxytetrahydrofuran-3-oxyl
gtagatggattttagtagta

SEQ ID NO: 992 - RNA, 20 nt, synthetic construct
  source 1..20: mol_type = other RNA
  modified_base 1: mod_base = OTHER; note = 2'-O-methyl-guanosine with phosphorothioate linkage
  modified_base 2: mod_base = OTHER; note = 2'-O-methyl-adenosine with phosphorothioate linkage
  modified_base 3: mod_base = OTHER; note = 2'-O-methyl-uridine
  modified_base 4: mod_base = OTHER; note = 2'-O-methyl-adenosine
  modified_base 5: mod_base = OTHER; note = 2'-O-methyl-guanosine
  modified_base 6: mod_base = OTHER; note = 2'-fluoro-cytidine
  modified_base 7: mod_base = OTHER; note = 2'-O-methyl-cytidine
  modified_base 8: mod_base = OTHER; note = 2'-fluoro-uridine
  modified_base 9: mod_base = OTHER; note = 2'-fluoro-uridine
  modified_base 10: mod_base = OTHER; note = 2'-fluoro-uridine
  modified_base 11: mod_base = OTHER; note = 2'-fluoro-adenosine
  modified_base 12: mod_base = OTHER; note = 2'-O-methyl-uridine
  modified_base 13: mod_base = OTHER; note = 2'-O-methyl-adenosine
  modified_base 14: mod_base = OTHER; note = 2'-O-methyl-cytidine
  modified_base 15: mod_base = OTHER; note = 2'-O-methyl-cytidine
  modified_base 16: mod_base = OTHER; note = 2'-O-methyl-adenosine
  modified_base 17: mod_base = OTHER; note = 2'-O-methyl-adenosine
  modified_base 18: mod_base = OTHER; note = 2'-O-methyl-adenosine with phosphorothioate linkage
  modified_base 19: mod_base = OTHER; note = 2'-O-methyl-adenosine with phosphorothioate linkage
  modified_base 20: mod_base = OTHER; note = 2'-O-methyl-adenosine conjugated to 3 iterations of (2R,3R,4R,5S)-5-(3-(5-(((2R,3R,4R,5R,6R)- 3-acetamido-4,5-dihydroxy-6-(hydroxymethyl)tetrahydro-2H-py ran-2-yl)oxy)pentanamido)propyl)-2-((hydroxyl)methyl)-4-met hoxytetrahydrofuran-3-oxyl
gatagcctttataccaaaaa

SEQ ID NO: 993 - RNA, 20 nt, synthetic construct
  source 1..20: mol_type = other RNA
  modified_base 1: mod_base = OTHER; note = 2'-O-methyl-guanosine with phosphorothioate linkage
  modified_base 2: mod_base = OTHER; note = 2'-O-methyl-cytidine with phosphorothioate linkage
  modified_base 3: mod_base = OTHER; note = 2'-O-methyl-cytidine
  modified_base 4: mod_base = OTHER; note = 2'-O-methyl-uridine
  modified_base 5: mod_base = OTHER; note = 2'-O-methyl-uridine
  modified_base 6: mod_base = OTHER; note = 2'-fluoro-uridine
  modified_base 7: mod_base = OTHER; note = 2'-O-methyl-adenosine
  modified_base 8: mod_base = OTHER; note = 2'-fluoro-uridine
  modified_base 9: mod_base = OTHER; note = 2'-fluoro-adenosine
  modified_base 10: mod_base = OTHER; note = 2'-fluoro-cytidine
  modified_base 11: mod_base = OTHER; note = 2'-fluoro-cytidine
  modified_base 12: mod_base = OTHER; note = 2'-O-methyl-adenosine
  modified_base 13: mod_base = OTHER; note = 2'-O-methyl-adenosine
  modified_base 14: mod_base = OTHER; note = 2'-O-methyl-adenosine
  modified_base 15: mod_base = OTHER; note = 2'-O-methyl-adenosine
  modified_base 16: mod_base = OTHER; note = 2'-O-methyl-uridine
  modified_base 17: mod_base = OTHER; note = 2'-O-methyl-guanosine
  modified_base 18: mod_base = OTHER; note = 2'-O-methyl-uridine with phosphorothioate linkage
  modified_base 19: mod_base = OTHER; note = 2'-O-methyl-uridine with phosphorothioate linkage
  modified_base 20: mod_base = OTHER; note = 2'-O-methyl-adenosine conjugated to 3 iterations of (2R,3R,4R,5S)-5-(3-(5-(((2R,3R,4R,5R,6R)- 3-acetamido-4,5-dihydroxy-6-(hydroxymethyl)tetrahydro-2H-py ran-2-yl)oxy)pentanamido)propyl)-2-((hydroxyl)methyl)-4-met hoxytetrahydrofuran-3-oxyl
gcctttataccaaaatgtta

SEQ ID NO: 994 - RNA, 20 nt, synthetic construct
  source 1..20: mol_type = other RNA
  modified_base 1: mod_base = OTHER; note = 2'-O-methyl-cytidine with phosphorothioate linkage
  modified_base 2: mod_base = OTHER; note = 2'-O-methyl-uridine with phosphorothioate linkage
  modified_base 3: mod_base = OTHER; note = 2'-O-methyl-guanosine
  modified_base 4: mod_base = OTHER; note = 2'-O-methyl-uridine
  modified_base 5: mod_base = OTHER; note = 2'-O-methyl-cytidine
  modified_base 6: mod_base = OTHER; note = 2'-fluoro-uridine
  modified_base 7: mod_base = OTHER; note = 2'-O-methyl-uridine
  modified_base 8: mod_base = OTHER; note = 2'-fluoro-cytidine
  modified_base 9: mod_base = OTHER; note = 2'-fluoro-adenosine
  modified_base 10: mod_base = OTHER; note = 2'-fluoro-guanosine
  modified_base 11: mod_base = OTHER; note = 2'-fluoro-adenosine
  modified_base 12: mod_base = OTHER; note = 2'-O-methyl-uridine
  modified_base 13: mod_base = OTHER; note = 2'-O-methyl-guanosine
  modified_base 14: mod_base = OTHER; note = 2'-O-methyl-uridine
  modified_base 15: mod_base = OTHER; note = 2'-O-methyl-adenosine
  modified_base 16: mod_base = OTHER; note = 2'-O-methyl-adenosine
  modified_base 17: mod_base = OTHER; note = 2'-O-methyl-adenosine
  modified_base 18: mod_base = OTHER; note = 2'-O-methyl-uridine with phosphorothioate linkage
  modified_base 19: mod_base = OTHER; note = 2'-O-methyl-adenosine with phosphorothioate linkage
  modified_base 20: mod_base = OTHER; note = 2'-O-methyl-adenosine conjugated to 3 iterations of (2R,3R,4R,5S)-5-(3-(5-(((2R,3R,4R,5R,6R)- 3-acetamido-4,5-dihydroxy-6-(hydroxymethyl)tetrahydro-2H-py ran-2-yl)oxy)pentanamido)propyl)-2-((hydroxyl)methyl)-4-met hoxytetrahydrofuran-3-oxyl
ctgtcttcagatgtaaataa

SEQ ID NO: 995 - RNA, 20 nt, synthetic construct
  source 1..20: mol_type = other RNA
  modified_base 1: mod_base = OTHER; note = 2'-O-methyl-guanosine with phosphorothioate linkage
  modified_base 2: mod_base = OTHER; note = 2'-O-methyl-adenosine with phosphorothioate linkage
  modified_base 3: mod_base = OTHER; note = 2'-O-methyl-adenosine
  modified_base 4: mod_base = OTHER; note = 2'-O-methyl-guanosine
  modified_base 5: mod_base = OTHER; note = 2'-O-methyl-uridine
  modified_base 6: mod_base = OTHER; note = 2'-fluoro-guanosine
  modified_base 7: mod_base = OTHER; note = 2'-O-methyl-uridine
  modified_base 8: mod_base = OTHER; note = 2'-fluoro-guanosine
  modified_base 9: mod_base = OTHER; note = 2'-fluoro-uridine
  modified_base 10: mod_base = OTHER; note = 2'-fluoro-adenosine
  modified_base 11: mod_base = OTHER; note = 2'-fluoro-uridine
  modified_base 12: mod_base = OTHER; note = 2'-O-methyl-guanosine
  modified_base 13: mod_base = OTHER; note = 2'-O-methyl-uridine
  modified_base 14: mod_base = OTHER; note = 2'-O-methyl-cytidine
  modified_base 15: mod_base = OTHER; note = 2'-O-methyl-uridine
  modified_base 16: mod_base = OTHER; note = 2'-O-methyl-uridine
  modified_base 17: mod_base = OTHER; note = 2'-O-methyl-uridine
  modified_base 18: mod_base = OTHER; note = 2'-O-methyl-uridine with phosphorothioate linkage
  modified_base 19: mod_base = OTHER; note = 2'-O-methyl-guanosine with phosphorothioate linkage
  modified_base 20: mod_base = OTHER; note = 2'-O-methyl-adenosine conjugated to 3 iterations of (2R,3R,4R,5S)-5-(3-(5-(((2R,3R,4R,5R,6R)- 3-acetamido-4,5-dihydroxy-6-(hydroxymethyl)tetrahydro-2H-py ran-2-yl)oxy)pentanamido)propyl)-2-((hydroxyl)methyl)-4-met hoxytetrahydrofuran-3-oxyl
gaagtgtgtatgtcttttga

SEQ ID NO: 996 - RNA, 20 nt, synthetic construct
  source 1..20: mol_type = other RNA
  modified_base 1: mod_base = OTHER; note = 2'-O-methyl-adenosine with phosphorothioate linkage
  modified_base 2: mod_base = OTHER; note = 2'-O-methyl-adenosine with phosphorothioate linkage
  modified_base 3: mod_base = OTHER; note = 2'-O-methyl-guanosine
  modified_base 4: mod_base = OTHER; note = 2'-O-methyl-uridine
  modified_base 5: mod_base = OTHER; note = 2'-O-methyl-guanosine
  modified_base 6: mod_base = OTHER; note = 2'-fluoro-uridine
  modified_base 7: mod_base = OTHER; note = 2'-O-methyl-guanosine
  modified_base 8: mod_base = OTHER; note = 2'-fluoro-uridine
  modified_base 9: mod_base = OTHER; note = 2'-fluoro-adenosine
  modified_base 10: mod_base = OTHER; note = 2'-fluoro-uridine
  modified_base 11: mod_base = OTHER; note = 2'-fluoro-guanosine
  modified_base 12: mod_base = OTHER; note = 2'-O-methyl-uridine
  modified_base 13: mod_base = OTHER; note = 2'-O-methyl-cytidine
  modified_base 14: mod_base = OTHER; note = 2'-O-methyl-uridine
  modified_base 15: mod_base = OTHER; note = 2'-O-methyl-uridine
  modified_base 16: mod_base = OTHER; note = 2'-O-methyl-uridine
  modified_base 17: mod_base = OTHER; note = 2'-O-methyl-uridine
  modified_base 18: mod_base = OTHER; note = 2'-O-methyl-guanosine with phosphorothioate linkage
  modified_base 19: mod_base = OTHER; note = 2'-O-methyl-uridine with phosphorothioate linkage
  modified_base 20: mod_base = OTHER; note = 2'-O-methyl-adenosine conjugated to 3 iterations of (2R,3R,4R,5S)-5-(3-(5-(((2R,3R,4R,5R,6R)- 3-acetamido-4,5-dihydroxy-6-(hydroxymethyl)tetrahydro-2H-py ran-2-yl)oxy)pentanamido)propyl)-2-((hydroxyl)methyl)-4-met hoxytetrahydrofuran-3-oxyl
aagtgtgtatgtcttttgta

SEQ ID NO: 997 - RNA, 20 nt, synthetic construct
  source 1..20: mol_type = other RNA
  modified_base 1: mod_base = OTHER; note = 2'-O-methyl-adenosine with phosphorothioate linkage
  modified_base 2: mod_base = OTHER; note = 2'-O-methyl-guanosine with phosphorothioate linkage
  modified_base 3: mod_base = OTHER; note = 2'-O-methyl-uridine
  modified_base 4: mod_base = OTHER; note = 2'-O-methyl-guanosine
  modified_base 5: mod_base = OTHER; note = 2'-O-methyl-uridine
  modified_base 6: mod_base = OTHER; note = 2'-fluoro-guanosine
  modified_base 7: mod_base = OTHER; note = 2'-O-methyl-uridine
  modified_base 8: mod_base = OTHER; note = 2'-fluoro-adenosine
  modified_base 9: mod_base = OTHER; note = 2'-fluoro-uridine
  modified_base 10: mod_base = OTHER; note = 2'-fluoro-guanosine
  modified_base 11: mod_base = OTHER; note = 2'-fluoro-uridine
  modified_base 12: mod_base = OTHER; note = 2'-O-methyl-cytidine
  modified_base 13: mod_base = OTHER; note = 2'-O-methyl-uridine
  modified_base 14: mod_base = OTHER; note = 2'-O-methyl-uridine
  modified_base 15: mod_base = OTHER; note = 2'-O-methyl-uridine
  modified_base 16: mod_base = OTHER; note = 2'-O-methyl-uridine
  modified_base 17: mod_base = OTHER; note = 2'-O-methyl-guanosine
  modified_base 18: mod_base = OTHER; note = 2'-O-methyl-uridine with phosphorothioate linkage
  modified_base 19: mod_base = OTHER; note = 2'-O-methyl-guanosine with phosphorothioate linkage
  modified_base 20: mod_base = OTHER; note = 2'-O-methyl-adenosine conjugated to 3 iterations of (2R,3R,4R,5S)-5-(3-(5-(((2R,3R,4R,5R,6R)- 3-acetamido-4,5-dihydroxy-6-(hydroxymethyl)tetrahydro-2H-py ran-2-yl)oxy)pentanamido)propyl)-2-((hydroxyl)methyl)-4-met hoxytetrahydrofuran-3-oxyl
agtgtgtatgtcttttgtga

SEQ ID NO: 998 - RNA, 20 nt, synthetic construct
  source 1..20: mol_type = other RNA
  modified_base 1: mod_base = OTHER; note = 2'-O-methyl-guanosine with phosphorothioate linkage
  modified_base 2: mod_base = OTHER; note = 2'-O-methyl-uridine with phosphorothioate linkage
  modified_base 3: mod_base = OTHER; note = 2'-O-methyl-guanosine
  modified_base 4: mod_base = OTHER; note = 2'-O-methyl-uridine
  modified_base 5: mod_base = OTHER; note = 2'-O-methyl-adenosine
  modified_base 6: mod_base = OTHER; note = 2'-fluoro-uridine
  modified_base 7: mod_base = OTHER; note = 2'-O-methyl-guanosine
  modified_base 8: mod_base = OTHER; note = 2'-fluoro-uridine
  modified_base 9: mod_base = OTHER; note = 2'-fluoro-cytidine
  modified_base 10: mod_base = OTHER; note = 2'-fluoro-uridine
  modified_base 11: mod_base = OTHER; note = 2'-fluoro-uridine
  modified_base 12: mod_base = OTHER; note = 2'-O-methyl-uridine
  modified_base 13: mod_base = OTHER; note = 2'-O-methyl-uridine
  modified_base 14: mod_base = OTHER; note = 2'-O-methyl-guanosine
  modified_base 15: mod_base = OTHER; note = 2'-O-methyl-uridine
  modified_base 16: mod_base = OTHER; note = 2'-O-methyl-guanosine
  modified_base 17: mod_base = OTHER; note = 2'-O-methyl-uridine
  modified_base 18: mod_base = OTHER; note = 2'-O-methyl-guanosine with phosphorothioate linkage
  modified_base 19: mod_base = OTHER; note = 2'-O-methyl-adenosine with phosphorothioate linkage
  modified_base 20: mod_base = OTHER; note = 2'-O-methyl-adenosine conjugated to 3 iterations of (2R,3R,4R,5S)-5-(3-(5-(((2R,3R,4R,5R,6R)- 3-acetamido-4,5-dihydroxy-6-(hydroxymethyl)tetrahydro-2H-py ran-2-yl)oxy)pentanamido)propyl)-2-((hydroxyl)methyl)-4-met hoxytetrahydrofuran-3-oxyl
gtgtatgtcttttgtgtgaa

SEQ ID NO: 999 - RNA, 20 nt, synthetic construct
  source 1..20: mol_type = other RNA
  modified_base 1: mod_base = OTHER; note = 2'-O-methyl-uridine with phosphorothioate linkage
  modified_base 2: mod_base = OTHER; note = 2'-O-methyl-guanosine with phosphorothioate linkage
  modified_base 3: mod_base = OTHER; note = 2'-O-methyl-uridine
  modified_base 4: mod_base = OTHER; note = 2'-O-methyl-adenosine
  modified_base 5: mod_base = OTHER; note = 2'-O-methyl-uridine
  modified_base 6: mod_base = OTHER; note = 2'-fluoro-guanosine
  modified_base 7: mod_base = OTHER; note = 2'-O-methyl-uridine
  modified_base 8: mod_base = OTHER; note = 2'-fluoro-cytidine
  modified_base 9: mod_base = OTHER; note = 2'-fluoro-uridine
  modified_base 10: mod_base = OTHER; note = 2'-fluoro-uridine
  modified_base 11: mod_base = OTHER; note = 2'-fluoro-uridine
  modified_base 12: mod_base = OTHER; note = 2'-O-methyl-uridine
  modified_base 13: mod_base = OTHER; note = 2'-O-methyl-guanosine
  modified_base 14: mod_base = OTHER; note = 2'-O-methyl-uridine
  modified_base 15: mod_base = OTHER; note = 2'-O-methyl-guanosine
  modified_base 16: mod_base = OTHER; note = 2'-O-methyl-uridine
  modified_base 17: mod_base = OTHER; note = 2'-O-methyl-guanosine
  modified_base 18: mod_base = OTHER; note = 2'-O-methyl-adenosine with phosphorothioate linkage
  modified_base 19: mod_base = OTHER; note = 2'-O-methyl-uridine with phosphorothioate linkage
  modified_base 20: mod_base = OTHER; note = 2'-O-methyl-adenosine conjugated to 3 iterations of (2R,3R,4R,5S)-5-(3-(5-(((2R,3R,4R,5R,6R)- 3-acetamido-4,5-dihydroxy-6-(hydroxymethyl)tetrahydro-2H-py ran-2-yl)oxy)pentanamido)propyl)-2-((hydroxyl)methyl)-4-met hoxytetrahydrofuran-3-oxyl
tgtatgtcttttgtgtgata

SEQ ID NO: 1000 - RNA, 20 nt, synthetic construct
  source 1..20: mol_type = other RNA
  modified_base 1: mod_base = OTHER; note = 2'-O-methyl-uridine with phosphorothioate linkage
  modified_base 2: mod_base = OTHER; note = 2'-O-methyl-adenosine with phosphorothioate linkage
  modified_base 3: mod_base = OTHER; note = 2'-O-methyl-uridine
  modified_base 4: mod_base = OTHER; note = 2'-O-methyl-guanosine
  modified_base 5: mod_base = OTHER; note = 2'-O-methyl-uridine
  modified_base 6: mod_base = OTHER; note = 2'-fluoro-cytidine
  modified_base 7: mod_base = OTHER; note = 2'-O-methyl-uridine
  modified_base 8: mod_base = OTHER; note = 2'-fluoro-uridine
  modified_base 9: mod_base = OTHER; note = 2'-fluoro-uridine
  modified_base 10: mod_base = OTHER; note = 2'-fluoro-uridine
  modified_base 11: mod_base = OTHER; note = 2'-fluoro-guanosine
  modified_base 12: mod_base = OTHER; note = 2'-O-methyl-uridine
  modified_base 13: mod_base = OTHER; note = 2'-O-methyl-guanosine
  modified_base 14: mod_base = OTHER; note = 2'-O-methyl-uridine
  modified_base 15: mod_base = OTHER; note = 2'-O-methyl-guanosine
  modified_base 16: mod_base = OTHER; note = 2'-O-methyl-adenosine
  modified_base 17: mod_base = OTHER; note = 2'-O-methyl-uridine
  modified_base 18: mod_base = OTHER; note = 2'-O-methyl-uridine with phosphorothioate linkage
  modified_base 19: mod_base = OTHER; note = 2'-O-methyl-cytidine with phosphorothioate linkage
  modified_base 20: mod_base = OTHER; note = 2'-O-methyl-adenosine conjugated to 3 iterations of (2R,3R,4R,5S)-5-(3-(5-(((2R,3R,4R,5R,6R)- 3-acetamido-4,5-dihydroxy-6-(hydroxymethyl)tetrahydro-2H-py ran-2-yl)oxy)pentanamido)propyl)-2-((hydroxyl)methyl)-4-met hoxytetrahydrofuran-3-oxyl
tatgtcttttgtgtgattca

SEQ ID NO: 1001 - RNA, 20 nt, synthetic construct
  source 1..20: mol_type = other RNA
  modified_base 1: mod_base = OTHER; note = 2'-O-methyl-adenosine with phosphorothioate linkage
  modified_base 2: mod_base = OTHER; note = 2'-O-methyl-uridine with phosphorothioate linkage
  modified_base 3: mod_base = OTHER; note = 2'-O-methyl-guanosine
  modified_base 4: mod_base = OTHER; note = 2'-O-methyl-uridine
  modified_base 5: mod_base = OTHER; note = 2'-O-methyl-cytidine
  modified_base 6: mod_base = OTHER; note = 2'-fluoro-uridine
  modified_base 7: mod_base = OTHER; note = 2'-O-methyl-uridine
  modified_base 8: mod_base = OTHER; note = 2'-fluoro-uridine
  modified_base 9: mod_base = OTHER; note = 2'-fluoro-uridine
  modified_base 10: mod_base = OTHER; note = 2'-fluoro-guanosine
  modified_base 11: mod_base = OTHER; note = 2'-fluoro-uridine
  modified_base 12: mod_base = OTHER; note = 2'-O-methyl-guanosine
  modified_base 13: mod_base = OTHER; note = 2'-O-methyl-uridine
  modified_base 14: mod_base = OTHER; note = 2'-O-methyl-guanosine
  modified_base 15: mod_base = OTHER; note = 2'-O-methyl-adenosine
  modified_base 16: mod_base = OTHER; note = 2'-O-methyl-uridine
  modified_base 17: mod_base = OTHER; note = 2'-O-methyl-uridine
  modified_base 18: mod_base = OTHER; note = 2'-O-methyl-cytidine with phosphorothioate linkage
  modified_base 19: mod_base = OTHER; note = 2'-O-methyl-uridine with phosphorothioate linkage
  modified_base 20: mod_base = OTHER; note = 2'-O-methyl-adenosine conjugated to 3 iterations of (2R,3R,4R,5S)-5-(3-(5-(((2R,3R,4R,5R,6R)- 3-acetamido-4,5-dihydroxy-6-(hydroxymethyl)tetrahydro-2H-py ran-2-yl)oxy)pentanamido)propyl)-2-((hydroxyl)methyl)-4-met hoxytetrahydrofuran-3-oxyl
atgtcttttgtgtgattcta

SEQ ID NO: 1002 - RNA, 20 nt, synthetic construct
  source 1..20: mol_type = other RNA
  modified_base 1: mod_base = OTHER; note = 2'-O-methyl-uridine with phosphorothioate linkage
  modified_base 2: mod_base = OTHER; note = 2'-O-methyl-guanosine with phosphorothioate linkage
  modified_base 3: mod_base = OTHER; note = 2'-O-methyl-uridine
  modified_base 4: mod_base = OTHER; note = 2'-O-methyl-cytidine
  modified_base 5: mod_base = OTHER; note = 2'-O-methyl-uridine
  modified_base 6: mod_base = OTHER; note = 2'-fluoro-uridine
  modified_base 7: mod_base = OTHER; note = 2'-O-methyl-uridine
  modified_base 8: mod_base = OTHER; note = 2'-fluoro-uridine
  modified_base 9: mod_base = OTHER; note = 2'-fluoro-guanosine
  modified_base 10: mod_base = OTHER; note = 2'-fluoro-uridine
  modified_base 11: mod_base = OTHER; note = 2'-fluoro-guanosine
  modified_base 12: mod_base = OTHER; note = 2'-O-methyl-uridine
  modified_base 13: mod_base = OTHER; note = 2'-O-methyl-guanosine
  modified_base 14: mod_base = OTHER; note = 2'-O-methyl-adenosine
  modified_base 15: mod_base = OTHER; note = 2'-O-methyl-uridine
  modified_base 16: mod_base = OTHER; note = 2'-O-methyl-uridine
  modified_base 17: mod_base = OTHER; note = 2'-O-methyl-cytidine
  modified_base 18: mod_base = OTHER; note = 2'-O-methyl-uridine with phosphorothioate linkage
  modified_base 19: mod_base = OTHER; note = 2'-O-methyl-uridine with phosphorothioate linkage
  modified_base 20: mod_base = OTHER; note = 2'-O-methyl-adenosine conjugated to 3 iterations of (2R,3R,4R,5S)-5-(3-(5-(((2R,3R,4R,5R,6R)- 3-acetamido-4,5-dihydroxy-6-(hydroxymethyl)tetrahydro-2H-py ran-2-yl)oxy)pentanamido)propyl)-2-((hydroxyl)methyl)-4-met hoxytetrahydrofuran-3-oxyl
tgtcttttgtgtgattctta

SEQ ID NO: 1003 - RNA, 20 nt, synthetic construct
  source 1..20: mol_type = other RNA
  modified_base 1: mod_base = OTHER; note = 2'-O-methyl-guanosine with phosphorothioate linkage
  modified_base 2: mod_base = OTHER; note = 2'-O-methyl-uridine with phosphorothioate linkage
  modified_base 3: mod_base = OTHER; note = 2'-O-methyl-cytidine
  modified_base 4: mod_base = OTHER; note = 2'-O-methyl-uridine
  modified_base 5: mod_base = OTHER; note = 2'-O-methyl-uridine
  modified_base 6: mod_base = OTHER; note = 2'-fluoro-uridine
  modified_base 7: mod_base = OTHER; note = 2'-O-methyl-uridine
  modified_base 8: mod_base = OTHER; note = 2'-fluoro-guanosine
  modified_base 9: mod_base = OTHER; note = 2'-fluoro-uridine
  modified_base 10: mod_base = OTHER; note = 2'-fluoro-guanosine
  modified_base 11: mod_base = OTHER; note = 2'-fluoro-uridine
  modified_base 12: mod_base = OTHER; note = 2'-O-methyl-guanosine
  modified_base 13: mod_base = OTHER; note = 2'-O-methyl-adenosine
  modified_base 14: mod_base = OTHER; note = 2'-O-methyl-uridine
  modified_base 15: mod_base = OTHER; note = 2'-O-methyl-uridine
  modified_base 16: mod_base = OTHER; note = 2'-O-methyl-cytidine
  modified_base 17: mod_base = OTHER; note = 2'-O-methyl-uridine
  modified_base 18: mod_base = OTHER; note = 2'-O-methyl-uridine with phosphorothioate linkage
  modified_base 19: mod_base = OTHER; note = 2'-O-methyl-cytidine with phosphorothioate linkage
  modified_base 20: mod_base = OTHER; note = 2'-O-methyl-adenosine conjugated to 3 iterations of (2R,3R,4R,5S)-5-(3-(5-(((2R,3R,4R,5R,6R)- 3-acetamido-4,5-dihydroxy-6-(hydroxymethyl)tetrahydro-2H-py ran-2-yl)oxy)pentanamido)propyl)-2-((hydroxyl)methyl)-4-met hoxytetrahydrofuran-3-oxyl
gtcttttgtgtgattcttca

SEQ ID NO: 1004 - RNA, 20 nt, synthetic construct
  source 1..20: mol_type = other RNA
  modified_base 1: mod_base = OTHER; note = 2'-O-methyl-uridine with phosphorothioate linkage
  modified_base 2: mod_base = OTHER; note = 2'-O-methyl-cytidine with phosphorothioate linkage
  modified_base 3: mod_base = OTHER; note = 2'-O-methyl-uridine
  modified_base 4: mod_base = OTHER; note = 2'-O-methyl-uridine
  modified_base 5: mod_base = OTHER; note = 2'-O-methyl-uridine
  modified_base 6: mod_base = OTHER; note = 2'-fluoro-uridine
  modified_base 7: mod_base = OTHER; note = 2'-O-methyl-guanosine
  modified_base 8: mod_base = OTHER; note = 2'-fluoro-uridine
  modified_base 9: mod_base = OTHER; note = 2'-fluoro-guanosine
  modified_base 10: mod_base = OTHER; note = 2'-fluoro-uridine
  modified_base 11: mod_base = OTHER; note = 2'-fluoro-guanosine
  modified_base 12: mod_base = OTHER; note = 2'-O-methyl-adenosine
  modified_base 13: mod_base = OTHER; note = 2'-O-methyl-uridine
  modified_base 14: mod_base = OTHER; note = 2'-O-methyl-uridine
  modified_base 15: mod_base = OTHER; note = 2'-O-methyl-cytidine
  modified_base 16: mod_base = OTHER; note = 2'-O-methyl-uridine
  modified_base 17: mod_base = OTHER; note = 2'-O-methyl-uridine
  modified_base 18: mod_base = OTHER; note = 2'-O-methyl-cytidine with phosphorothioate linkage
  modified_base 19: mod_base = OTHER; note = 2'-O-methyl-adenosine with phosphorothioate linkage
  modified_base 20: mod_base = OTHER; note = 2'-O-methyl-adenosine conjugated to 3 iterations of (2R,3R,4R,5S)-5-(3-(5-(((2R,3R,4R,5R,6R)- 3-acetamido-4,5-dihydroxy-6-(hydroxymethyl)tetrahydro-2H-py ran-2-yl)oxy)pentanamido)propyl)-2-((hydroxyl)methyl)-4-met hoxytetrahydrofuran-3-oxyl
tcttttgtgtgattcttcaa

SEQ ID NO: 1005 - RNA, 20 nt, synthetic construct
  source 1..20: mol_type = other RNA
  modified_base 1: mod_base = OTHER; note = 2'-O-methyl-uridine with phosphorothioate linkage
  modified_base 2: mod_base = OTHER; note = 2'-O-methyl-uridine with phosphorothioate linkage
  modified_base 3: mod_base = OTHER; note = 2'-O-methyl-uridine
  modified_base 4: mod_base = OTHER; note = 2'-O-methyl-uridine
  modified_base 5: mod_base = OTHER; note = 2'-O-methyl-guanosine
  modified_base 6: mod_base = OTHER; note = 2'-fluoro-uridine
  modified_base 7: mod_base = OTHER; note = 2'-O-methyl-guanosine
  modified_base 8: mod_base = OTHER; note = 2'-fluoro-uridine
  modified_base 9: mod_base = OTHER; note = 2'-fluoro-guanosine
  modified_base 10: mod_base = OTHER; note = 2'-fluoro-adenosine
  modified_base 11: mod_base = OTHER; note = 2'-fluoro-uridine
  modified_base 12: mod_base = OTHER; note = 2'-O-methyl-uridine
  modified_base 13: mod_base = OTHER; note = 2'-O-methyl-cytidine
  modified_base 14: mod_base = OTHER; note = 2'-O-methyl-uridine
  modified_base 15: mod_base = OTHER; note = 2'-O-methyl-uridine
  modified_base 16: mod_base = OTHER; note = 2'-O-methyl-cytidine
  modified_base 17: mod_base = OTHER; note = 2'-O-methyl-adenosine
  modified_base 18: mod_base = OTHER; note = 2'-O-methyl-adenosine with phosphorothioate linkage
  modified_base 19: mod_base = OTHER; note = 2'-O-methyl-adenosine with phosphorothioate linkage
  modified_base 20: mod_base = OTHER; note = 2'-O-methyl-adenosine conjugated to 3 iterations of (2R,3R,4R,5S)-5-(3-(5-(((2R,3R,4R,5R,6R)- 3-acetamido-4,5-dihydroxy-6-(hydroxymethyl)tetrahydro-2H-py ran-2-yl)oxy)pentanamido)propyl)-2-((hydroxyl)methyl)-4-met hoxytetrahydrofuran-3-oxyl
ttttgtgtgattcttcaaaa

SEQ ID NO: 1006 - RNA, 20 nt, synthetic construct
  source 1..20: mol_type = other RNA
  modified_base 1: mod_base = OTHER; note = 2'-O-methyl-cytidine with phosphorothioate linkage
  modified_base 2: mod_base = OTHER; note = 2'-O-methyl-cytidine with phosphorothioate linkage
  modified_base 3: mod_base = OTHER; note = 2'-O-methyl-adenosine
  modified_base 4: mod_base = OTHER; note = 2'-O-methyl-adenosine
  modified_base 5: mod_base = OTHER; note = 2'-O-methyl-cytidine
  modified_base 6: mod_base = OTHER; note = 2'-fluoro-adenosine
  modified_base 7: mod_base = OTHER; note = 2'-O-methyl-adenosine
  modified_base 8: mod_base = OTHER; note = 2'-fluoro-uridine
  modified_base 9: mod_base = OTHER; note = 2'-fluoro-guanosine
  modified_base 10: mod_base = OTHER; note = 2'-fluoro-uridine
  modified_base 11: mod_base = OTHER; note = 2'-fluoro-uridine
  modified_base 12: mod_base = OTHER; note = 2'-O-methyl-adenosine
  modified_base 13: mod_base = OTHER; note = 2'-O-methyl-cytidine
  modified_base 14: mod_base = OTHER; note = 2'-O-methyl-cytidine
  modified_base 15: mod_base = OTHER; note = 2'-O-methyl-adenosine
  modified_base 16: mod_base = OTHER; note = 2'-O-methyl-adenosine
  modified_base 17: mod_base = OTHER; note = 2'-O-methyl-adenosine
  modified_base 18: mod_base = OTHER; note = 2'-O-methyl-adenosine with phosphorothioate linkage
  modified_base 19: mod_base = OTHER; note = 2'-O-methyl-cytidine with phosphorothioate linkage
  modified_base 20: mod_base = OTHER; note = 2'-O-methyl-adenosine conjugated to 3 iterations of (2R,3R,4R,5S)-5-(3-(5-(((2R,3R,4R,5R,6R)- 3-acetamido-4,5-dihydroxy-6-(hydroxymethyl)tetrahydro-2H-py ran-2-yl)oxy)pentanamido)propyl)-2-((hydroxyl)methyl)-4-met hoxytetrahydrofuran-3-oxyl
ccaacaatgttaccaaaaca

SEQ ID NO: 1007 - RNA, 20 nt, synthetic construct
  source 1..20: mol_type = other RNA
  modified_base 1: mod_base = OTHER; note = 2'-O-methyl-adenosine with phosphorothioate linkage
  modified_base 2: mod_base = OTHER; note = 2'-O-methyl-adenosine with phosphorothioate linkage
  modified_base 3: mod_base = OTHER; note = 2'-O-methyl-cytidine
  modified_base 4: mod_base = OTHER; note = 2'-O-methyl-adenosine
  modified_base 5: mod_base = OTHER; note = 2'-O-methyl-adenosine
  modified_base 6: mod_base = OTHER; note = 2'-fluoro-uridine
  modified_base 7: mod_base = OTHER; note = 2'-O-methyl-guanosine
  modified_base 8: mod_base = OTHER; note = 2'-fluoro-uridine
  modified_base 9: mod_base = OTHER; note = 2'-fluoro-uridine
  modified_base 10: mod_base = OTHER; note = 2'-fluoro-adenosine
  modified_base 11: mod_base = OTHER; note = 2'-fluoro-cytidine
  modified_base 12: mod_base = OTHER; note = 2'-O-methyl-cytidine
  modified_base 13: mod_base = OTHER; note = 2'-O-methyl-adenosine
  modified_base 14: mod_base = OTHER; note = 2'-O-methyl-adenosine
  modified_base 15: mod_base = OTHER; note = 2'-O-methyl-adenosine
  modified_base 16: mod_base = OTHER; note = 2'-O-methyl-adenosine
  modified_base 17: mod_base = OTHER; note = 2'-O-methyl-cytidine
  modified_base 18: mod_base = OTHER; note = 2'-O-methyl-cytidine with phosphorothioate linkage
  modified_base 19: mod_base = OTHER; note = 2'-O-methyl-guanosine with phosphorothioate linkage
  modified_base 20: mod_base = OTHER; note = 2'-O-methyl-adenosine conjugated to 3 iterations of (2R,3R,4R,5S)-5-(3-(5-(((2R,3R,4R,5R,6R)- 3-acetamido-4,5-dihydroxy-6-(hydroxymethyl)tetrahydro-2H-py ran-2-yl)oxy)pentanamido)propyl)-2-((hydroxyl)methyl)-4-met hoxytetrahydrofuran-3-oxyl
aacaatgttaccaaaaccga

SEQ ID NO: 1008 - RNA, 20 nt, synthetic construct
  source 1..20: mol_type = other RNA
  modified_base 1: mod_base = OTHER; note = 2'-O-methyl-cytidine with phosphorothioate linkage
  modified_base 2: mod_base = OTHER; note = 2'-O-methyl-adenosine with phosphorothioate linkage
  modified_base 3: mod_base = OTHER; note = 2'-O-methyl-adenosine
  modified_base 4: mod_base = OTHER; note = 2'-O-methyl-uridine
  modified_base 5: mod_base = OTHER; note = 2'-O-methyl-guanosine
  modified_base 6: mod_base = OTHER; note = 2'-fluoro-uridine
  modified_base 7: mod_base = OTHER; note = 2'-O-methyl-uridine
  modified_base 8: mod_base = OTHER; note = 2'-fluoro-adenosine
  modified_base 9: mod_base = OTHER; note = 2'-fluoro-cytidine
  modified_base 10: mod_base = OTHER; note = 2'-fluoro-cytidine
  modified_base 11: mod_base = OTHER; note = 2'-fluoro-adenosine
  modified_base 12: mod_base = OTHER; note = 2'-O-methyl-adenosine
  modified_base 13: mod_base = OTHER; note = 2'-O-methyl-adenosine
  modified_base 14: mod_base = OTHER; note = 2'-O-methyl-adenosine
  modified_base 15: mod_base = OTHER; note = 2'-O-methyl-cytidine
  modified_base 16: mod_base = OTHER; note = 2'-O-methyl-cytidine
  modified_base 17: mod_base = OTHER; note = 2'-O-methyl-guanosine
  modified_base 18: mod_base = OTHER; note = 2'-O-methyl-adenosine with phosphorothioate linkage
  modified_base 19: mod_base = OTHER; note = 2'-O-methyl-adenosine with phosphorothioate linkage
  modified_base 20: mod_base = OTHER; note = 2'-O-methyl-adenosine conjugated to 3 iterations of (2R,3R,4R,5S)-5-(3-(5-(((2R,3R,4R,5R,6R)- 3-acetamido-4,5-dihydroxy-6-(hydroxymethyl)tetrahydro-2H-py ran-2-yl)oxy)pentanamido)propyl)-2-((hydroxyl)methyl)-4-met hoxytetrahydrofuran-3-oxyl
caatgttaccaaaaccgaaa

SEQ ID NO: 1009 - RNA, 20 nt, synthetic construct
  source 1..20: mol_type = other RNA
  modified_base 1: mod_base = OTHER; note = 2'-O-methyl-adenosine with phosphorothioate linkage
  modified_base 2: mod_base = OTHER; note = 2'-O-methyl-uridine with phosphorothioate linkage
  modified_base 3: mod_base = OTHER; note = 2'-O-methyl-guanosine
  modified_base 4: mod_base = OTHER; note = 2'-O-methyl-uridine
  modified_base 5: mod_base = OTHER; note = 2'-O-methyl-uridine
  modified_base 6: mod_base = OTHER; note = 2'-fluoro-adenosine
  modified_base 7: mod_base = OTHER; note = 2'-O-methyl-cytidine
  modified_base 8: mod_base = OTHER; note = 2'-fluoro-cytidine
  modified_base 9: mod_base = OTHER; note = 2'-fluoro-adenosine
  modified_base 10: mod_base = OTHER; note = 2'-fluoro-adenosine
  modified_base 11: mod_base = OTHER; note = 2'-fluoro-adenosine
  modified_base 12: mod_base = OTHER; note = 2'-O-methyl-adenosine
  modified_base 13: mod_base = OTHER; note = 2'-O-methyl-cytidine
  modified_base 14: mod_base = OTHER; note = 2'-O-methyl-cytidine
  modified_base 15: mod_base = OTHER; note = 2'-O-methyl-guanosine
  modified_base 16: mod_base = OTHER; note = 2'-O-methyl-adenosine
  modified_base 17: mod_base = OTHER; note = 2'-O-methyl-adenosine
  modified_base 18: mod_base = OTHER; note = 2'-O-methyl-uridine with phosphorothioate linkage
  modified_base 19: mod_base = OTHER; note = 2'-O-methyl-guanosine with phosphorothioate linkage
  modified_base 20: mod_base = OTHER; note = 2'-O-methyl-adenosine conjugated to 3 iterations of (2R,3R,4R,5S)-5-(3-(5-(((2R,3R,4R,5R,6R)- 3-acetamido-4,5-dihydroxy-6-(hydroxymethyl)tetrahydro-2H-py ran-2-yl)oxy)pentanamido)propyl)-2-((hydroxyl)methyl)-4-met hoxytetrahydrofuran-3-oxyl
atgttaccaaaaccgaatga

SEQ ID NO: 1010 - RNA, 20 nt, synthetic construct
  source 1..20: mol_type = other RNA
  modified_base 1: mod_base = OTHER; note = 2'-O-methyl-guanosine with phosphorothioate linkage
  modified_base 2: mod_base = OTHER; note = 2'-O-methyl-uridine with phosphorothioate linkage
  modified_base 3: mod_base = OTHER; note = 2'-O-methyl-uridine
  modified_base 4: mod_base = OTHER; note = 2'-O-methyl-adenosine
  modified_base 5: mod_base = OTHER; note = 2'-O-methyl-cytidine
  modified_base 6: mod_base = OTHER; note = 2'-fluoro-cytidine
  modified_base 7: mod_base = OTHER; note = 2'-O-methyl-adenosine
  modified_base 8: mod_base = OTHER; note = 2'-fluoro-adenosine
  modified_base 9: mod_base = OTHER; note = 2'-fluoro-adenosine
  modified_base 10: mod_base = OTHER; note = 2'-fluoro-adenosine
  modified_base 11: mod_base = OTHER; note = 2'-fluoro-cytidine
  modified_base 12: mod_base = OTHER; note = 2'-O-methyl-cytidine
  modified_base 13: mod_base = OTHER; note = 2'-O-methyl-guanosine
  modified_base 14: mod_base = OTHER; note = 2'-O-methyl-adenosine
  modified_base 15: mod_base = OTHER; note = 2'-O-methyl-adenosine
  modified_base 16: mod_base = OTHER; note = 2'-O-methyl-uridine
  modified_base 17: mod_base = OTHER; note = 2'-O-methyl-guanosine
  modified_base 18: mod_base = OTHER; note = 2'-O-methyl-cytidine with phosphorothioate linkage
  modified_base 19: mod_base = OTHER; note = 2'-O-methyl-uridine with phosphorothioate linkage
  modified_base 20: mod_base = OTHER; note = 2'-O-methyl-adenosine conjugated to 3 iterations of (2R,3R,4R,5S)-5-(3-(5-(((2R,3R,4R,5R,6R)- 3-acetamido-4,5-dihydroxy-6-(hydroxymethyl)tetrahydro-2H-py ran-2-yl)oxy)pentanamido)propyl)-2-((hydroxyl)methyl)-4-met hoxytetrahydrofuran-3-oxyl
gttaccaaaaccgaatgcta

SEQ ID NO: 1011 - RNA, 20 nt, synthetic construct
  source 1..20: mol_type = other RNA
  modified_base 1: mod_base = OTHER; note = 2'-O-methyl-cytidine with phosphorothioate linkage
  modified_base 2: mod_base = OTHER; note = 2'-O-methyl-cytidine with phosphorothioate linkage
  modified_base 3: mod_base = OTHER; note = 2'-O-methyl-adenosine
  modified_base 4: mod_base = OTHER; note = 2'-O-methyl-adenosine
  modified_base 5: mod_base = OTHER; note = 2'-O-methyl-adenosine
  modified_base 6: mod_base = OTHER; note = 2'-fluoro-adenosine
  modified_base 7: mod_base = OTHER; note = 2'-O-methyl-cytidine
  modified_base 8: mod_base = OTHER; note = 2'-fluoro-cytidine
  modified_base 9: mod_base = OTHER; note = 2'-fluoro-guanosine
  modified_base 10: mod_base = OTHER; note = 2'-fluoro-adenosine
  modified_base 11: mod_base = OTHER; note = 2'-fluoro-adenosine
  modified_base 12: mod_base = OTHER; note = 2'-O-methyl-uridine
  modified_base 13: mod_base = OTHER; note = 2'-O-methyl-guanosine
  modified_base 14: mod_base = OTHER; note = 2'-O-methyl-cytidine
  modified_base 15: mod_base = OTHER; note = 2'-O-methyl-uridine
  modified_base 16: mod_base = OTHER; note = 2'-O-methyl-guanosine
  modified_base 17: mod_base = OTHER; note = 2'-O-methyl-cytidine
  modified_base 18: mod_base = OTHER; note = 2'-O-methyl-uridine with phosphorothioate linkage
  modified_base 19: mod_base = OTHER; note = 2'-O-methyl-uridine with phosphorothioate linkage
  modified_base 20: mod_base = OTHER; note = 2'-O-methyl-adenosine conjugated to 3 iterations of (2R,3R,4R,5S)-5-(3-(5-(((2R,3R,4R,5R,6R)- 3-acetamido-4,5-dihydroxy-6-(hydroxymethyl)tetrahydro-2H-py ran-2-yl)oxy)pentanamido)propyl)-2-((hydroxyl)methyl)-4-met hoxytetrahydrofuran-3-oxyl
ccaaaaccgaatgctgctta

SEQ ID NO: 1012 - RNA, 20 nt, synthetic construct
  source 1..20: mol_type = other RNA
  modified_base 1: mod_base = OTHER; note = 2'-O-methyl-cytidine with phosphorothioate linkage
  modified_base 2: mod_base = OTHER; note = 2'-O-methyl-uridine with phosphorothioate linkage
  modified_base 3: mod_base = OTHER; note = 2'-O-methyl-uridine
  modified_base 4: mod_base = OTHER; note = 2'-O-methyl-cytidine
  modified_base 5: mod_base = OTHER; note = 2'-O-methyl-adenosine
  modified_base 6: mod_base = OTHER; note = 2'-fluoro-cytidine
  modified_base 7: mod_base = OTHER; note = 2'-O-methyl-adenosine
  modified_base 8: mod_base = OTHER; note = 2'-fluoro-guanosine
  modified_base 9: mod_base = OTHER; note = 2'-fluoro-adenosine
  modified_base 10: mod_base = OTHER; note = 2'-fluoro-uridine
  modified_base 11: mod_base = OTHER; note = 2'-fluoro-uridine
  modified_base 12: mod_base = OTHER; note = 2'-O-methyl-uridine
  modified_base 13: mod_base = OTHER; note = 2'-O-methyl-uridine
  modified_base 14: mod_base = OTHER; note = 2'-O-methyl-uridine
  modified_base 15: mod_base = OTHER; note = 2'-O-methyl-guanosine
  modified_base 16: mod_base = OTHER; note = 2'-O-methyl-cytidine
  modified_base 17: mod_base = OTHER; note = 2'-O-methyl-adenosine
  modified_base 18: mod_base = OTHER; note = 2'-O-methyl-adenosine with phosphorothioate linkage
  modified_base 19: mod_base = OTHER; note = 2'-O-methyl-cytidine with phosphorothioate linkage
  modified_base 20: mod_base = OTHER; note = 2'-O-methyl-adenosine conjugated to 3 iterations of (2R,3R,4R,5S)-5-(3-(5-(((2R,3R,4R,5R,6R)- 3-acetamido-4,5-dihydroxy-6-(hydroxymethyl)tetrahydro-2H-py ran-2-yl)oxy)pentanamido)propyl)-2-((hydroxyl)methyl)-4-met hoxytetrahydrofuran-3-oxyl
cttcacagatttttgcaaca

SEQ ID NO: 1013 - RNA, 20 nt, synthetic construct
  source 1..20: mol_type = other RNA
  modified_base 1: mod_base = OTHER; note = 2'-O-methyl-uridine with phosphorothioate linkage
  modified_base 2: mod_base = OTHER; note = 2'-O-methyl-uridine with phosphorothioate linkage
  modified_base 3: mod_base = OTHER; note = 2'-O-methyl-cytidine
  modified_base 4: mod_base = OTHER; note = 2'-O-methyl-adenosine
  modified_base 5: mod_base = OTHER; note = 2'-O-methyl-cytidine
  modified_base 6: mod_base = OTHER; note = 2'-fluoro-adenosine
  modified_base 7: mod_base = OTHER; note = 2'-O-methyl-guanosine
  modified_base 8: mod_base = OTHER; note = 2'-fluoro-adenosine
  modified_base 9: mod_base = OTHER; note = 2'-fluoro-uridine
  modified_base 10: mod_base = OTHER; note = 2'-fluoro-uridine
  modified_base 11: mod_base = OTHER; note = 2'-fluoro-uridine
  modified_base 12: mod_base = OTHER; note = 2'-O-methyl-uridine
  modified_base 13: mod_base = OTHER; note = 2'-O-methyl-uridine
  modified_base 14: mod_base = OTHER; note = 2'-O-methyl-guanosine
  modified_base 15: mod_base = OTHER; note = 2'-O-methyl-cytidine
  modified_base 16: mod_base = OTHER; note = 2'-O-methyl-adenosine
  modified_base 17: mod_base = OTHER; note = 2'-O-methyl-adenosine
  modified_base 18: mod_base = OTHER; note = 2'-O-methyl-cytidine with phosphorothioate linkage
  modified_base 19: mod_base = OTHER; note = 2'-O-methyl-adenosine with phosphorothioate linkage
  modified_base 20: mod_base = OTHER; note = 2'-O-methyl-adenosine conjugated to 3 iterations of (2R,3R,4R,5S)-5-(3-(5-(((2R,3R,4R,5R,6R)- 3-acetamido-4,5-dihydroxy-6-(hydroxymethyl)tetrahydro-2H-py ran-2-yl)oxy)pentanamido)propyl)-2-((hydroxyl)methyl)-4-met hoxytetrahydrofuran-3-oxyl
ttcacagatttttgcaacaa

SEQ ID NO: 1014 - RNA, 20 nt, synthetic construct
  source 1..20: mol_type = other RNA
  modified_base 1: mod_base = OTHER; note = 2'-O-methyl-uridine with phosphorothioate linkage
  modified_base 2: mod_base = OTHER; note = 2'-O-methyl-cytidine with phosphorothioate linkage
  modified_base 3: mod_base = OTHER; note = 2'-O-methyl-adenosine
  modified_base 4: mod_base = OTHER; note = 2'-O-methyl-cytidine
  modified_base 5: mod_base = OTHER; note = 2'-O-methyl-adenosine
  modified_base 6: mod_base = OTHER; note = 2'-fluoro-guanosine
  modified_base 7: mod_base = OTHER; note = 2'-O-methyl-adenosine
  modified_base 8: mod_base = OTHER; note = 2'-fluoro-uridine
  modified_base 9: mod_base = OTHER; note = 2'-fluoro-uridine
  modified_base 10: mod_base = OTHER; note = 2'-fluoro-uridine
  modified_base 11: mod_base = OTHER; note = 2'-fluoro-uridine
  modified_base 12: mod_base = OTHER; note = 2'-O-methyl-uridine
  modified_base 13: mod_base = OTHER; note = 2'-O-methyl-guanosine
  modified_base 14: mod_base = OTHER; note = 2'-O-methyl-cytidine
  modified_base 15: mod_base = OTHER; note = 2'-O-methyl-adenosine
  modified_base 16: mod_base = OTHER; note = 2'-O-methyl-adenosine
  modified_base 17: mod_base = OTHER; note = 2'-O-methyl-cytidine
  modified_base 18: mod_base = OTHER; note = 2'-O-methyl-adenosine with phosphorothioate linkage
  modified_base 19: mod_base = OTHER; note = 2'-O-methyl-adenosine with phosphorothioate linkage
  modified_base 20: mod_base = OTHER; note = 2'-O-methyl-adenosine conjugated to 3 iterations of (2R,3R,4R,5S)-5-(3-(5-(((2R,3R,4R,5R,6R)- 3-acetamido-4,5-dihydroxy-6-(hydroxymethyl)tetrahydro-2H-py ran-2-yl)oxy)pentanamido)propyl)-2-((hydroxyl)methyl)-4-met hoxytetrahydrofuran-3-oxyl
tcacagatttttgcaacaaa

SEQ ID NO: 1015 - RNA, 20 nt, synthetic construct
  source 1..20: mol_type = other RNA
  modified_base 1: mod_base = OTHER; note = 2'-O-methyl-cytidine with phosphorothioate linkage
  modified_base 2: mod_base = OTHER; note = 2'-O-methyl-adenosine with phosphorothioate linkage
  modified_base 3: mod_base = OTHER; note = 2'-O-methyl-cytidine
  modified_base 4: mod_base = OTHER; note = 2'-O-methyl-adenosine
  modified_base 5: mod_base = OTHER; note = 2'-O-methyl-guanosine
  modified_base 6: mod_base = OTHER; note = 2'-fluoro-adenosine
  modified_base 7: mod_base = OTHER; note = 2'-O-methyl-uridine
  modified_base 8: mod_base = OTHER; note = 2'-fluoro-uridine
  modified_base 9: mod_base = OTHER; note = 2'-fluoro-uridine
  modified_base 10: mod_base = OTHER; note = 2'-fluoro-uridine
  modified_base 11: mod_base = OTHER; note = 2'-fluoro-uridine
  modified_base 12: mod_base = OTHER; note = 2'-O-methyl-guanosine
  modified_base 13: mod_base = OTHER; note = 2'-O-methyl-cytidine
  modified_base 14: mod_base = OTHER; note = 2'-O-methyl-adenosine
  modified_base 15: mod_base = OTHER; note = 2'-O-methyl-adenosine
  modified_base 16: mod_base = OTHER; note = 2'-O-methyl-cytidine
  modified_base 17: mod_base = OTHER; note = 2'-O-methyl-adenosine
  modified_base 18: mod_base = OTHER; note = 2'-O-methyl-adenosine with phosphorothioate linkage
  modified_base 19: mod_base = OTHER; note = 2'-O-methyl-cytidine with phosphorothioate linkage
  modified_base 20: mod_base = OTHER; note = 2'-O-methyl-adenosine conjugated to 3 iterations of (2R,3R,4R,5S)-5-(3-(5-(((2R,3R,4R,5R,6R)- 3-acetamido-4,5-dihydroxy-6-(hydroxymethyl)tetrahydro-2H-py ran-2-yl)oxy)pentanamido)propyl)-2-((hydroxyl)methyl)-4-met hoxytetrahydrofuran-3-oxyl
cacagatttttgcaacaaca

SEQ ID NO: 1016 - RNA, 20 nt, synthetic construct
  source 1..20: mol_type = other RNA
  modified_base 1: mod_base = OTHER; note = 2'-O-methyl-adenosine with phosphorothioate linkage
  modified_base 2: mod_base = OTHER; note = 2'-O-methyl-cytidine with phosphorothioate linkage
  modified_base 3: mod_base = OTHER; note = 2'-O-methyl-adenosine
  modified_base 4: mod_base = OTHER; note = 2'-O-methyl-guanosine
  modified_base 5: mod_base = OTHER; note = 2'-O-methyl-adenosine
  modified_base 6: mod_base = OTHER; note = 2'-fluoro-uridine
  modified_base 7: mod_base = OTHER; note = 2'-O-methyl-uridine
  modified_base 8: mod_base = OTHER; note = 2'-fluoro-uridine
  modified_base 9: mod_base = OTHER; note = 2'-fluoro-uridine
  modified_base 10: mod_base = OTHER; note = 2'-fluoro-uridine
  modified_base 11: mod_base = OTHER; note = 2'-fluoro-guanosine
  modified_base 12: mod_base = OTHER; note = 2'-O-methyl-cytidine
  modified_base 13: mod_base = OTHER; note = 2'-O-methyl-adenosine
  modified_base 14: mod_base = OTHER; note = 2'-O-methyl-adenosine
  modified_base 15: mod_base = OTHER; note = 2'-O-methyl-cytidine
  modified_base 16: mod_base = OTHER; note = 2'-O-methyl-adenosine
  modified_base 17: mod_base = OTHER; note = 2'-O-methyl-adenosine
  modified_base 18: mod_base = OTHER; note = 2'-O-methyl-cytidine with phosphorothioate linkage
  modified_base 19: mod_base = OTHER; note = 2'-O-methyl-adenosine with phosphorothioate linkage
  modified_base 20: mod_base = OTHER; note = 2'-O-methyl-adenosine conjugated to 3 iterations of (2R,3R,4R,5S)-5-(3-(5-(((2R,3R,4R,5R,6R)- 3-acetamido-4,5-dihydroxy-6-(hydroxymethyl)tetrahydro-2H-py ran-2-yl)oxy)pentanamido)propyl)-2-((hydroxyl)methyl)-4-met hoxytetrahydrofuran-3-oxyl
acagatttttgcaacaacaa

SEQ ID NO: 1017 - RNA, 20 nt, synthetic construct
  source 1..20: mol_type = other RNA
  modified_base 1: mod_base = OTHER; note = 2'-O-methyl-adenosine with phosphorothioate linkage
  modified_base 2: mod_base = OTHER; note = 2'-O-methyl-guanosine with phosphorothioate linkage
  modified_base 3: mod_base = OTHER; note = 2'-O-methyl-adenosine
  modified_base 4: mod_base = OTHER; note = 2'-O-methyl-uridine
  modified_base 5: mod_base = OTHER; note = 2'-O-methyl-uridine
  modified_base 6: mod_base = OTHER; note = 2'-fluoro-uridine
  modified_base 7: mod_base = OTHER; note = 2'-O-methyl-uridine
  modified_base 8: mod_base = OTHER; note = 2'-fluoro-uridine
  modified_base 9: mod_base = OTHER; note = 2'-fluoro-guanosine
  modified_base 10: mod_base = OTHER; note = 2'-fluoro-cytidine
  modified_base 11: mod_base = OTHER; note = 2'-fluoro-adenosine
  modified_base 12: mod_base = OTHER; note = 2'-O-methyl-adenosine
  modified_base 13: mod_base = OTHER; note = 2'-O-methyl-cytidine
  modified_base 14: mod_base = OTHER; note = 2'-O-methyl-adenosine
  modified_base 15: mod_base = OTHER; note = 2'-O-methyl-adenosine
  modified_base 16: mod_base = OTHER; note = 2'-O-methyl-cytidine
  modified_base 17: mod_base = OTHER; note = 2'-O-methyl-adenosine
  modified_base 18: mod_base = OTHER; note = 2'-O-methyl-uridine with phosphorothioate linkage
  modified_base 19: mod_base = OTHER; note = 2'-O-methyl-adenosine with phosphorothioate linkage
  modified_base 20: mod_base = OTHER; note = 2'-O-methyl-adenosine conjugated to 3 iterations of (2R,3R,4R,5S)-5-(3-(5-(((2R,3R,4R,5R,6R)- 3-acetamido-4,5-dihydroxy-6-(hydroxymethyl)tetrahydro-2H-py ran-2-yl)oxy)pentanamido)propyl)-2-((hydroxyl)methyl)-4-met hoxytetrahydrofuran-3-oxyl
agatttttgcaacaacataa

SEQ ID NO: 1018 - RNA, 20 nt, synthetic construct
  source 1..20: mol_type = other RNA
  modified_base 1: mod_base = OTHER; note = 2'-O-methyl-guanosine with phosphorothioate linkage
  modified_base 2: mod_base = OTHER; note = 2'-O-methyl-adenosine with phosphorothioate linkage
  modified_base 3: mod_base = OTHER; note = 2'-O-methyl-uridine
  modified_base 4: mod_base = OTHER; note = 2'-O-methyl-uridine
  modified_base 5: mod_base = OTHER; note = 2'-O-methyl-uridine
  modified_base 6: mod_base = OTHER; note = 2'-fluoro-uridine
  modified_base 7: mod_base = OTHER; note = 2'-O-methyl-uridine
  modified_base 8: mod_base = OTHER; note = 2'-fluoro-guanosine
  modified_base 9: mod_base = OTHER; note = 2'-fluoro-cytidine
  modified_base 10: mod_base = OTHER; note = 2'-fluoro-adenosine
  modified_base 11: mod_base = OTHER; note = 2'-fluoro-adenosine
  modified_base 12: mod_base = OTHER; note = 2'-O-methyl-cytidine
  modified_base 13: mod_base = OTHER; note = 2'-O-methyl-adenosine
  modified_base 14: mod_base = OTHER; note = 2'-O-methyl-adenosine
  modified_base 15: mod_base = OTHER; note = 2'-O-methyl-cytidine
  modified_base 16: mod_base = OTHER; note = 2'-O-methyl-adenosine
  modified_base 17: mod_base = OTHER; note = 2'-O-methyl-uridine
  modified_base 18: mod_base = OTHER; note = 2'-O-methyl-adenosine with phosphorothioate linkage
  modified_base 19: mod_base = OTHER; note = 2'-O-methyl-adenosine with phosphorothioate linkage
  modified_base 20: mod_base = OTHER; note = 2'-O-methyl-adenosine conjugated to 3 iterations of (2R,3R,4R,5S)-5-(3-(5-(((2R,3R,4R,5R,6R)- 3-acetamido-4,5-dihydroxy-6-(hydroxymethyl)tetrahydro-2H-py ran-2-yl)oxy)pentanamido)propyl)-2-((hydroxyl)methyl)-4-met hoxytetrahydrofuran-3-oxyl
gatttttgcaacaacataaa

SEQ ID NO: 1019 - RNA, 20 nt, synthetic construct
  source 1..20: mol_type = other RNA
  modified_base 1: mod_base = OTHER; note = 2'-O-methyl-uridine with phosphorothioate linkage
  modified_base 2: mod_base = OTHER; note = 2'-O-methyl-cytidine with phosphorothioate linkage
  modified_base 3: mod_base = OTHER; note = 2'-O-methyl-uridine
  modified_base 4: mod_base = OTHER; note = 2'-O-methyl-cytidine
  modified_base 5: mod_base = OTHER; note = 2'-O-methyl-uridine
  modified_base 6: mod_base = OTHER; note = 2'-fluoro-guanosine
  modified_base 7: mod_base = OTHER; note = 2'-O-methyl-adenosine
  modified_base 8: mod_base = OTHER; note = 2'-fluoro-guanosine
  modified_base 9: mod_base = OTHER; note = 2'-fluoro-uridine
  modified_base 10: mod_base = OTHER; note = 2'-fluoro-guanosine
  modified_base 11: mod_base = OTHER; note = 2'-fluoro-cytidine
  modified_base 12: mod_base = OTHER; note = 2'-O-methyl-adenosine
  modified_base 13: mod_base = OTHER; note = 2'-O-methyl-adenosine
  modified_base 14: mod_base = OTHER; note = 2'-O-methyl-uridine
  modified_base 15: mod_base = OTHER; note = 2'-O-methyl-cytidine
  modified_base 16: mod_base = OTHER; note = 2'-O-methyl-uridine
  modified_base 17: mod_base = OTHER; note = 2'-O-methyl-guanosine
  modified_base 18: mod_base = OTHER; note = 2'-O-methyl-guanosine with phosphorothioate linkage
  modified_base 19: mod_base = OTHER; note = 2'-O-methyl-uridine with phosphorothioate linkage
  modified_base 20: mod_base = OTHER; note = 2'-O-methyl-adenosine conjugated to 3 iterations of (2R,3R,4R,5S)-5-(3-(5-(((2R,3R,4R,5R,6R)- 3-acetamido-4,5-dihydroxy-6-(hydroxymethyl)tetrahydro-2H-py ran-2-yl)oxy)pentanamido)propyl)-2-((hydroxyl)methyl)-4-met hoxytetrahydrofuran-3-oxyl
tctctgagtgcaatctggta

SEQ ID NO: 1020 - RNA, 20 nt, synthetic construct
  source 1..20: mol_type = other RNA
  modified_base 1: mod_base = OTHER; note = 2'-O-methyl-cytidine with phosphorothioate linkage
  modified_base 2: mod_base = OTHER; note = 2'-O-methyl-uridine with phosphorothioate linkage
  modified_base 3: mod_base = OTHER; note = 2'-O-methyl-cytidine
  modified_base 4: mod_base = OTHER; note = 2'-O-methyl-uridine
  modified_base 5: mod_base = OTHER; note = 2'-O-methyl-guanosine
  modified_base 6: mod_base = OTHER; note = 2'-fluoro-adenosine
  modified_base 7: mod_base = OTHER; note = 2'-O-methyl-guanosine
  modified_base 8: mod_base = OTHER; note = 2'-fluoro-uridine
  modified_base 9: mod_base = OTHER; note = 2'-fluoro-guanosine
  modified_base 10: mod_base = OTHER; note = 2'-fluoro-cytidine
  modified_base 11: mod_base = OTHER; note = 2'-fluoro-adenosine
  modified_base 12: mod_base = OTHER; note = 2'-O-methyl-adenosine
  modified_base 13: mod_base = OTHER; note = 2'-O-methyl-uridine
  modified_base 14: mod_base = OTHER; note = 2'-O-methyl-cytidine
  modified_base 15: mod_base = OTHER; note = 2'-O-methyl-uridine
  modified_base 16: mod_base = OTHER; note = 2'-O-methyl-guanosine
  modified_base 17: mod_base = OTHER; note = 2'-O-methyl-guanosine
  modified_base 18: mod_base = OTHER; note = 2'-O-methyl-uridine with phosphorothioate linkage
  modified_base 19: mod_base = OTHER; note = 2'-O-methyl-adenosine with phosphorothioate linkage
  modified_base 20: mod_base = OTHER; note = 2'-O-methyl-adenosine conjugated to 3 iterations of (2R,3R,4R,5S)-5-(3-(5-(((2R,3R,4R,5R,6R)- 3-acetamido-4,5-dihydroxy-6-(hydroxymethyl)tetrahydro-2H-py ran-2-yl)oxy)pentanamido)propyl)-2-((hydroxyl)methyl)-4-met hoxytetrahydrofuran-3-oxyl
ctctgagtgcaatctggtaa

SEQ ID NO: 1021 - RNA, 20 nt, synthetic construct
  source 1..20: mol_type = other RNA
  modified_base 1: mod_base = OTHER; note = 2'-O-methyl-uridine with phosphorothioate linkage
  modified_base 2: mod_base = OTHER; note = 2'-O-methyl-cytidine with phosphorothioate linkage
  modified_base 3: mod_base = OTHER; note = 2'-O-methyl-uridine
  modified_base 4: mod_base = OTHER; note = 2'-O-methyl-guanosine
  modified_base 5: mod_base = OTHER; note = 2'-O-methyl-adenosine
  modified_base 6: mod_base = OTHER; note = 2'-fluoro-guanosine
  modified_base 7: mod_base = OTHER; note = 2'-O-methyl-uridine
  modified_base 8: mod_base = OTHER; note = 2'-fluoro-guanosine
  modified_base 9: mod_base = OTHER; note = 2'-fluoro-cytidine
  modified_base 10: mod_base = OTHER; note = 2'-fluoro-adenosine
  modified_base 11: mod_base = OTHER; note = 2'-fluoro-adenosine
  modified_base 12: mod_base = OTHER; note = 2'-O-methyl-uridine
  modified_base 13: mod_base = OTHER; note = 2'-O-methyl-cytidine
  modified_base 14: mod_base = OTHER; note = 2'-O-methyl-uridine
  modified_base 15: mod_base = OTHER; note = 2'-O-methyl-guanosine
  modified_base 16: mod_base = OTHER; note = 2'-O-methyl-guanosine
  modified_base 17: mod_base = OTHER; note = 2'-O-methyl-uridine
  modified_base 18: mod_base = OTHER; note = 2'-O-methyl-adenosine with phosphorothioate linkage
  modified_base 19: mod_base = OTHER; note = 2'-O-methyl-adenosine with phosphorothioate linkage
  modified_base 20: mod_base = OTHER; note = 2'-O-methyl-adenosine conjugated to 3 iterations of (2R,3R,4R,5S)-5-(3-(5-(((2R,3R,4R,5R,6R)- 3-acetamido-4,5-dihydroxy-6-(hydroxymethyl)tetrahydro-2H-py ran-2-yl)oxy)pentanamido)propyl)-2-((hydroxyl)methyl)-4-met hoxytetrahydrofuran-3-oxyl
tctgagtgcaatctggtaaa

SEQ ID NO: 1022 - RNA, 20 nt, synthetic construct
  source 1..20: mol_type = other RNA
  modified_base 1: mod_base = OTHER; note = 2'-O-methyl-uridine with phosphorothioate linkage
  modified_base 2: mod_base = OTHER; note = 2'-O-methyl-guanosine with phosphorothioate linkage
  modified_base 3: mod_base = OTHER; note = 2'-O-methyl-adenosine
  modified_base 4: mod_base = OTHER; note = 2'-O-methyl-guanosine
  modified_base 5: mod_base = OTHER; note = 2'-O-methyl-uridine
  modified_base 6: mod_base = OTHER; note = 2'-fluoro-guanosine
  modified_base 7: mod_base = OTHER; note = 2'-O-methyl-cytidine
  modified_base 8: mod_base = OTHER; note = 2'-fluoro-adenosine
  modified_base 9: mod_base = OTHER; note = 2'-fluoro-adenosine
  modified_base 10: mod_base = OTHER; note = 2'-fluoro-uridine
  modified_base 11: mod_base = OTHER; note = 2'-fluoro-cytidine
  modified_base 12: mod_base = OTHER; note = 2'-O-methyl-uridine
  modified_base 13: mod_base = OTHER; note = 2'-O-methyl-guanosine
  modified_base 14: mod_base = OTHER; note = 2'-O-methyl-guanosine
  modified_base 15: mod_base = OTHER; note = 2'-O-methyl-uridine
  modified_base 16: mod_base = OTHER; note = 2'-O-methyl-adenosine
  modified_base 17: mod_base = OTHER; note = 2'-O-methyl-adenosine
  modified_base 18: mod_base = OTHER; note = 2'-O-methyl-adenosine with phosphorothioate linkage
  modified_base 19: mod_base = OTHER; note = 2'-O-methyl-uridine with phosphorothioate linkage
  modified_base 20: mod_base = OTHER; note = 2'-O-methyl-adenosine conjugated to 3 iterations of (2R,3R,4R,5S)-5-(3-(5-(((2R,3R,4R,5R,6R)- 3-acetamido-4,5-dihydroxy-6-(hydroxymethyl)tetrahydro-2H-py ran-2-yl)oxy)pentanamido)propyl)-2-((hydroxyl)methyl)-4-met hoxytetrahydrofuran-3-oxyl
tgagtgcaatctggtaaata

SEQ ID NO: 1023 - RNA, 20 nt, synthetic construct
  source 1..20: mol_type = other RNA
  modified_base 1: mod_base = OTHER; note = 2'-O-methyl-guanosine with phosphorothioate linkage
  modified_base 2: mod_base = OTHER; note = 2'-O-methyl-adenosine with phosphorothioate linkage
  modified_base 3: mod_base = OTHER; note = 2'-O-methyl-guanosine
  modified_base 4: mod_base = OTHER; note = 2'-O-methyl-uridine
  modified_base 5: mod_base = OTHER; note = 2'-O-methyl-guanosine
  modified_base 6: mod_base = OTHER; note = 2'-fluoro-cytidine
  modified_base 7: mod_base = OTHER; note = 2'-O-methyl-adenosine
  modified_base 8: mod_base = OTHER; note = 2'-fluoro-adenosine
  modified_base 9: mod_base = OTHER; note = 2'-fluoro-uridine
  modified_base 10: mod_base = OTHER; note = 2'-fluoro-cytidine
  modified_base 11: mod_base = OTHER; note = 2'-fluoro-uridine
  modified_base 12: mod_base = OTHER; note = 2'-O-methyl-guanosine
  modified_base 13: mod_base = OTHER; note = 2'-O-methyl-guanosine
  modified_base 14: mod_base = OTHER; note = 2'-O-methyl-uridine
  modified_base 15: mod_base = OTHER; note = 2'-O-methyl-adenosine
  modified_base 16: mod_base = OTHER; note = 2'-O-methyl-adenosine
  modified_base 17: mod_base = OTHER; note = 2'-O-methyl-adenosine
  modified_base 18: mod_base = OTHER; note = 2'-O-methyl-uridine with phosphorothioate linkage
  modified_base 19: mod_base = OTHER; note = 2'-O-methyl-guanosine with phosphorothioate linkage
  modified_base 20: mod_base = OTHER; note = 2'-O-methyl-adenosine conjugated to 3 iterations of (2R,3R,4R,5S)-5-(3-(5-(((2R,3R,4R,5R,6R)- 3-acetamido-4,5-dihydroxy-6-(hydroxymethyl)tetrahydro-2H-py ran-2-yl)oxy)pentanamido)propyl)-2-((hydroxyl)methyl)-4-met hoxytetrahydrofuran-3-oxyl
gagtgcaatctggtaaatga

SEQ ID NO: 1024 - RNA, 20 nt, synthetic construct
  source 1..20: mol_type = other RNA
  modified_base 1: mod_base = OTHER; note = 2'-O-methyl-adenosine with phosphorothioate linkage
  modified_base 2: mod_base = OTHER; note = 2'-O-methyl-guanosine with phosphorothioate linkage
  modified_base 3: mod_base = OTHER; note = 2'-O-methyl-uridine
  modified_base 4: mod_base = OTHER; note = 2'-O-methyl-guanosine
  modified_base 5: mod_base = OTHER; note = 2'-O-methyl-cytidine
  modified_base 6: mod_base = OTHER; note = 2'-fluoro-adenosine
  modified_base 7: mod_base = OTHER; note = 2'-O-methyl-adenosine
  modified_base 8: mod_base = OTHER; note = 2'-fluoro-uridine
  modified_base 9: mod_base = OTHER; note = 2'-fluoro-cytidine
  modified_base 10: mod_base = OTHER; note = 2'-fluoro-uridine
  modified_base 11: mod_base = OTHER; note = 2'-fluoro-guanosine
  modified_base 12: mod_base = OTHER; note = 2'-O-methyl-guanosine
  modified_base 13: mod_base = OTHER; note = 2'-O-methyl-uridine
  modified_base 14: mod_base = OTHER; note = 2'-O-methyl-adenosine
  modified_base 15: mod_base = OTHER; note = 2'-O-methyl-adenosine
  modified_base 16: mod_base = OTHER; note = 2'-O-methyl-adenosine
  modified_base 17: mod_base = OTHER; note = 2'-O-methyl-uridine
  modified_base 18: mod_base = OTHER; note = 2'-O-methyl-guanosine with phosphorothioate linkage
  modified_base 19: mod_base = OTHER; note = 2'-O-methyl-cytidine with phosphorothioate linkage
  modified_base 20: mod_base = OTHER; note = 2'-O-methyl-adenosine conjugated to 3 iterations of (2R,3R,4R,5S)-5-(3-(5-(((2R,3R,4R,5R,6R)- 3-acetamido-4,5-dihydroxy-6-(hydroxymethyl)tetrahydro-2H-py ran-2-yl)oxy)pentanamido)propyl)-2-((hydroxyl)methyl)-4-met hoxytetrahydrofuran-3-oxyl
agtgcaatctggtaaatgca

SEQ ID NO: 1025 - RNA, 20 nt, synthetic construct
  source 1..20: mol_type = other RNA
  modified_base 1: mod_base = OTHER; note = 2'-O-methyl-uridine with phosphorothioate linkage
  modified_base 2: mod_base = OTHER; note = 2'-O-methyl-guanosine with phosphorothioate linkage
  modified_base 3: mod_base = OTHER; note = 2'-O-methyl-guanosine
  modified_base 4: mod_base = OTHER; note = 2'-O-methyl-adenosine
  modified_base 5: mod_base = OTHER; note = 2'-O-methyl-cytidine
  modified_base 6: mod_base = OTHER; note = 2'-fluoro-uridine
  modified_base 7: mod_base = OTHER; note = 2'-O-methyl-cytidine
  modified_base 8: mod_base = OTHER; note = 2'-fluoro-adenosine
  modified_base 9: mod_base = OTHER; note = 2'-fluoro-adenosine
  modified_base 10: mod_base = OTHER; note = 2'-fluoro-cytidine
  modified_base 11: mod_base = OTHER; note = 2'-fluoro-uridine
  modified_base 12: mod_base = OTHER; note = 2'-O-methyl-uridine
  modified_base 13: mod_base = OTHER; note = 2'-O-methyl-uridine
  modified_base 14: mod_base = OTHER; note = 2'-O-methyl-guanosine
  modified_base 15: mod_base = OTHER; note = 2'-O-methyl-guanosine
  modified_base 16: mod_base = OTHER; note = 2'-O-methyl-cytidine
  modified_base 17: mod_base = OTHER; note = 2'-O-methyl-uridine
  modified_base 18: mod_base = OTHER; note = 2'-O-methyl-guanosine with phosphorothioate linkage
  modified_base 19: mod_base = OTHER; note = 2'-O-methyl-guanosine with phosphorothioate linkage
  modified_base 20: mod_base = OTHER; note = 2'-O-methyl-adenosine conjugated to 3 iterations of (2R,3R,4R,5S)-5-(3-(5-(((2R,3R,4R,5R,6R)- 3-acetamido-4,5-dihydroxy-6-(hydroxymethyl)tetrahydro-2H-py ran-2-yl)oxy)pentanamido)propyl)-2-((hydroxyl)methyl)-4-met hoxytetrahydrofuran-3-oxyl
tggactcaactttggctgga

SEQ ID NO: 1026 - RNA, 20 nt, synthetic construct
  source 1..20: mol_type = other RNA
  modified_base 1: mod_base = OTHER; note = 2'-O-methyl-guanosine with phosphorothioate linkage
  modified_base 2: mod_base = OTHER; note = 2'-O-methyl-adenosine with phosphorothioate linkage
  modified_base 3: mod_base = OTHER; note = 2'-O-methyl-cytidine
  modified_base 4: mod_base = OTHER; note = 2'-O-methyl-uridine
  modified_base 5: mod_base = OTHER; note = 2'-O-methyl-cytidine
  modified_base 6: mod_base = OTHER; note = 2'-fluoro-adenosine
  modified_base 7: mod_base = OTHER; note = 2'-O-methyl-adenosine
  modified_base 8: mod_base = OTHER; note = 2'-fluoro-cytidine
  modified_base 9: mod_base = OTHER; note = 2'-fluoro-uridine
  modified_base 10: mod_base = OTHER; note = 2'-fluoro-uridine
  modified_base 11: mod_base = OTHER; note = 2'-fluoro-uridine
  modified_base 12: mod_base = OTHER; note = 2'-O-methyl-guanosine
  modified_base 13: mod_base = OTHER; note = 2'-O-methyl-guanosine
  modified_base 14: mod_base = OTHER; note = 2'-O-methyl-cytidine
  modified_base 15: mod_base = OTHER; note = 2'-O-methyl-uridine
  modified_base 16: mod_base = OTHER; note = 2'-O-methyl-guanosine
  modified_base 17: mod_base = OTHER; note = 2'-O-methyl-guanosine
  modified_base 18: mod_base = OTHER; note = 2'-O-methyl-uridine with phosphorothioate linkage
  modified_base 19: mod_base = OTHER; note = 2'-O-methyl-adenosine with phosphorothioate linkage
  modified_base 20: mod_base = OTHER; note = 2'-O-methyl-adenosine conjugated to 3 iterations of (2R,3R,4R,5S)-5-(3-(5-(((2R,3R,4R,5R,6R)- 3-acetamido-4,5-dihydroxy-6-(hydroxymethyl)tetrahydro-2H-py ran-2-yl)oxy)pentanamido)propyl)-2-((hydroxyl)methyl)-4-met hoxytetrahydrofuran-3-oxyl
gactcaactttggctggtaa

SEQ ID NO: 1027 - RNA, 20 nt, synthetic construct
  source 1..20: mol_type = other RNA
  modified_base 1: mod_base = OTHER; note = 2'-O-methyl-uridine with phosphorothioate linkage
  modified_base 2: mod_base = OTHER; note = 2'-O-methyl-uridine with phosphorothioate linkage
  modified_base 3: mod_base = OTHER; note = 2'-O-methyl-guanosine
  modified_base 4: mod_base = OTHER; note = 2'-O-methyl-guanosine
  modified_base 5: mod_base = OTHER; note = 2'-O-methyl-cytidine
  modified_base 6: mod_base = OTHER; note = 2'-fluoro-uridine
  modified_base 7: mod_base = OTHER; note = 2'-O-methyl-guanosine
  modified_base 8: mod_base = OTHER; note = 2'-fluoro-guanosine
  modified_base 9: mod_base = OTHER; note = 2'-fluoro-uridine
  modified_base 10: mod_base = OTHER; note = 2'-fluoro-adenosine
  modified_base 11: mod_base = OTHER; note = 2'-fluoro-uridine
  modified_base 12: mod_base = OTHER; note = 2'-O-methyl-cytidine
  modified_base 13: mod_base = OTHER; note = 2'-O-methyl-uridine
  modified_base 14: mod_base = OTHER; note = 2'-O-methyl-guanosine
  modified_base 15: mod_base = OTHER; note = 2'-O-methyl-adenosine
  modified_base 16: mod_base = OTHER; note = 2'-O-methyl-adenosine
  modified_base 17: mod_base = OTHER; note = 2'-O-methyl-uridine
  modified_base 18: mod_base = OTHER; note = 2'-O-methyl-adenosine with phosphorothioate linkage
  modified_base 19: mod_base = OTHER; note = 2'-O-methyl-uridine with phosphorothioate linkage
  modified_base 20: mod_base = OTHER; note = 2'-O-methyl-adenosine conjugated to 3 iterations of (2R,3R,4R,5S)-5-(3-(5-(((2R,3R,4R,5R,6R)- 3-acetamido-4,5-dihydroxy-6-(hydroxymethyl)tetrahydro-2H-py ran-2-yl)oxy)pentanamido)propyl)-2-((hydroxyl)methyl)-4-met hoxytetrahydrofuran-3-oxyl
ttggctggtatctgaatata

SEQ ID NO: 1028 - RNA, 20 nt, synthetic construct
  source 1..20: mol_type = other RNA
  modified_base 1: mod_base = OTHER; note = 2'-O-methyl-uridine with phosphorothioate linkage
  modified_base 2: mod_base = OTHER; note = 2'-O-methyl-cytidine with phosphorothioate linkage
  modified_base 3: mod_base = OTHER; note = 2'-O-methyl-guanosine
  modified_base 4: mod_base = OTHER; note = 2'-O-methyl-adenosine
  modified_base 5: mod_base = OTHER; note = 2'-O-methyl-guanosine
  modified_base 6: mod_base = OTHER; note = 2'-fluoro-adenosine
  modified_base 7: mod_base = OTHER; note = 2'-O-methyl-cytidine
  modified_base 8: mod_base = OTHER; note = 2'-fluoro-adenosine
  modified_base 9: mod_base = OTHER; note = 2'-fluoro-uridine
  modified_base 10: mod_base = OTHER; note = 2'-fluoro-adenosine
  modified_base 11: mod_base = OTHER; note = 2'-fluoro-adenosine
  modified_base 12: mod_base = OTHER; note = 2'-O-methyl-adenosine
  modified_base 13: mod_base = OTHER; note = 2'-O-methyl-adenosine
  modified_base 14: mod_base = OTHER; note = 2'-O-methyl-uridine
  modified_base 15: mod_base = OTHER; note = 2'-O-methyl-cytidine
  modified_base 16: mod_base = OTHER; note = 2'-O-methyl-adenosine
  modified_base 17: mod_base = OTHER; note = 2'-O-methyl-adenosine
  modified_base 18: mod_base = OTHER; note = 2'-O-methyl-adenosine with phosphorothioate linkage
  modified_base 19: mod_base = OTHER; note = 2'-O-methyl-guanosine with phosphorothioate linkage
  modified_base 20: mod_base = OTHER; note = 2'-O-methyl-adenosine conjugated to 3 iterations of (2R,3R,4R,5S)-5-(3-(5-(((2R,3R,4R,5R,6R)- 3-acetamido-4,5-dihydroxy-6-(hydroxymethyl)tetrahydro-2H-py ran-2-yl)oxy)pentanamido)propyl)-2-((hydroxyl)methyl)-4-met hoxytetrahydrofuran-3-oxyl
tcgagacataaaatcaaaga

SEQ ID NO: 1029 - RNA, 20 nt, synthetic construct
  source 1..20: mol_type = other RNA
  modified_base 1: mod_base = OTHER; note = 2'-O-methyl-guanosine with phosphorothioate linkage
  modified_base 2: mod_base = OTHER; note = 2'-O-methyl-adenosine with phosphorothioate linkage
  modified_base 3: mod_base = OTHER; note = 2'-O-methyl-guanosine
  modified_base 4: mod_base = OTHER; note = 2'-O-methyl-adenosine
  modified_base 5: mod_base = OTHER; note = 2'-O-methyl-cytidine
  modified_base 6: mod_base = OTHER; note = 2'-fluoro-adenosine
  modified_base 7: mod_base = OTHER; note = 2'-O-methyl-uridine
  modified_base 8: mod_base = OTHER; note = 2'-fluoro-adenosine
  modified_base 9: mod_base = OTHER; note = 2'-fluoro-adenosine
  modified_base 10: mod_base = OTHER; note = 2'-fluoro-adenosine
  modified_base 11: mod_base = OTHER; note = 2'-fluoro-adenosine
  modified_base 12: mod_base = OTHER; note = 2'-O-methyl-uridine
  modified_base 13: mod_base = OTHER; note = 2'-O-methyl-cytidine
  modified_base 14: mod_base = OTHER; note = 2'-O-methyl-adenosine
  modified_base 15: mod_base = OTHER; note = 2'-O-methyl-adenosine
  modified_base 16: mod_base = OTHER; note = 2'-O-methyl-adenosine
  modified_base 17: mod_base = OTHER; note = 2'-O-methyl-guanosine
  modified_base 18: mod_base = OTHER; note = 2'-O-methyl-adenosine with phosphorothioate linkage
  modified_base 19: mod_base = OTHER; note = 2'-O-methyl-adenosine with phosphorothioate linkage
  modified_base 20: mod_base = OTHER; note = 2'-O-methyl-adenosine conjugated to 3 iterations of (2R,3R,4R,5S)-5-(3-(5-(((2R,3R,4R,5R,6R)- 3-acetamido-4,5-dihydroxy-6-(hydroxymethyl)tetrahydro-2H-py ran-2-yl)oxy)pentanamido)propyl)-2-((hydroxyl)methyl)-4-met hoxytetrahydrofuran-3-oxyl
gagacataaaatcaaagaaa

SEQ ID NO: 1030 - RNA, 20 nt, synthetic construct
  source 1..20: mol_type = other RNA
  modified_base 1: mod_base = OTHER; note = 2'-O-methyl-adenosine with phosphorothioate linkage
  modified_base 2: mod_base = OTHER; note = 2'-O-methyl-cytidine with phosphorothioate linkage
  modified_base 3: mod_base = OTHER; note = 2'-O-methyl-cytidine
  modified_base 4: mod_base = OTHER; note = 2'-O-methyl-adenosine
  modified_base 5: mod_base = OTHER; note = 2'-O-methyl-guanosine
  modified_base 6: mod_base = OTHER; note = 2'-fluoro-uridine
  modified_base 7: mod_base = OTHER; note = 2'-O-methyl-guanosine
  modified_base 8: mod_base = OTHER; note = 2'-fluoro-guanosine
  modified_base 9: mod_base = OTHER; note = 2'-fluoro-cytidine
  modified_base 10: mod_base = OTHER; note = 2'-fluoro-adenosine
  modified_base 11: mod_base = OTHER; note = 2'-fluoro-adenosine
  modified_base 12: mod_base = OTHER; note = 2'-O-methyl-adenosine
  modified_base 13: mod_base = OTHER; note = 2'-O-methyl-guanosine
  modified_base 14: mod_base = OTHER; note = 2'-O-methyl-uridine
  modified_base 15: mod_base = OTHER; note = 2'-O-methyl-uridine
  modified_base 16: mod_base = OTHER; note = 2'-O-methyl-guanosine
  modified_base 17: mod_base = OTHER; note = 2'-O-methyl-uridine
  modified_base 18: mod_base = OTHER; note = 2'-O-methyl-guanosine with phosphorothioate linkage
  modified_base 19: mod_base = OTHER; note = 2'-O-methyl-adenosine with phosphorothioate linkage
  modified_base 20: mod_base = OTHER; note = 2'-O-methyl-adenosine conjugated to 3 iterations of (2R,3R,4R,5S)-5-(3-(5-(((2R,3R,4R,5R,6R)- 3-acetamido-4,5-dihydroxy-6-(hydroxymethyl)tetrahydro-2H-py ran-2-yl)oxy)pentanamido)propyl)-2-((hydroxyl)methyl)-4-met hoxytetrahydrofuran-3-oxyl
accagtggcaaagttgtgaa

SEQ ID NO: 1031 - RNA, 20 nt, synthetic construct
  source 1..20: mol_type = other RNA
  modified_base 1: mod_base = OTHER; note = 2'-O-methyl-cytidine with phosphorothioate linkage
  modified_base 2: mod_base = OTHER; note = 2'-O-methyl-uridine with phosphorothioate linkage
  modified_base 3: mod_base = OTHER; note = 2'-O-methyl-cytidine
  modified_base 4: mod_base = OTHER; note = 2'-O-methyl-uridine
  modified_base 5: mod_base = OTHER; note = 2'-O-methyl-uridine
  modified_base 6: mod_base = OTHER; note = 2'-fluoro-cytidine
  modified_base 7: mod_base = OTHER; note = 2'-O-methyl-guanosine
  modified_base 8: mod_base = OTHER; note = 2'-fluoro-uridine
  modified_base 9: mod_base = OTHER; note = 2'-fluoro-adenosine
  modified_base 10: mod_base = OTHER; note = 2'-fluoro-uridine
  modified_base 11: mod_base = OTHER; note = 2'-fluoro-uridine
  modified_base 12: mod_base = OTHER; note = 2'-O-methyl-adenosine
  modified_base 13: mod_base = OTHER; note = 2'-O-methyl-adenosine
  modified_base 14: mod_base = OTHER; note = 2'-O-methyl-guanosine
  modified_base 15: mod_base = OTHER; note = 2'-O-methyl-adenosine
  modified_base 16: mod_base = OTHER; note = 2'-O-methyl-adenosine
  modified_base 17: mod_base = OTHER; note = 2'-O-methyl-guanosine
  modified_base 18: mod_base = OTHER; note = 2'-O-methyl-adenosine with phosphorothioate linkage
  modified_base 19: mod_base = OTHER; note = 2'-O-methyl-cytidine with phosphorothioate linkage
  modified_base 20: mod_base = OTHER; note = 2'-O-methyl-adenosine conjugated to 3 iterations of (2R,3R,4R,5S)-5-(3-(5-(((2R,3R,4R,5R,6R)- 3-acetamido-4,5-dihydroxy-6-(hydroxymethyl)tetrahydro-2H-py ran-2-yl)oxy)pentanamido)propyl)-2-((hydroxyl)methyl)-4-met hoxytetrahydrofuran-3-oxyl
ctcttcgtattaagaagaca

SEQ ID NO: 1032 - RNA, 20 nt, synthetic construct
  source 1..20: mol_type = other RNA
  modified_base 1: mod_base = OTHER; note = 2'-O-methyl-uridine with phosphorothioate linkage
  modified_base 2: mod_base = OTHER; note = 2'-O-methyl-cytidine with phosphorothioate linkage
  modified_base 3: mod_base = OTHER; note = 2'-O-methyl-uridine
  modified_base 4: mod_base = OTHER; note = 2'-O-methyl-uridine
  modified_base 5: mod_base = OTHER; note = 2'-O-methyl-cytidine
  modified_base 6: mod_base = OTHER; note = 2'-fluoro-guanosine
  modified_base 7: mod_base = OTHER; note = 2'-O-methyl-uridine
  modified_base 8: mod_base = OTHER; note = 2'-fluoro-adenosine
  modified_base 9: mod_base = OTHER; note = 2'-fluoro-uridine
  modified_base 10: mod_base = OTHER; note = 2'-fluoro-uridine
  modified_base 11: mod_base = OTHER; note = 2'-fluoro-adenosine
  modified_base 12: mod_base = OTHER; note = 2'-O-methyl-adenosine
  modified_base 13: mod_base = OTHER; note = 2'-O-methyl-guanosine
  modified_base 14: mod_base = OTHER; note = 2'-O-methyl-adenosine
  modified_base 15: mod_base = OTHER; note = 2'-O-methyl-adenosine
  modified_base 16: mod_base = OTHER; note = 2'-O-methyl-guanosine
  modified_base 17: mod_base = OTHER; note = 2'-O-methyl-adenosine
  modified_base 18: mod_base = OTHER; note = 2'-O-methyl-cytidine with phosphorothioate linkage
  modified_base 19: mod_base = OTHER; note = 2'-O-methyl-uridine with phosphorothioate linkage
  modified_base 20: mod_base = OTHER; note = 2'-O-methyl-adenosine conjugated to 3 iterations of (2R,3R,4R,5S)-5-(3-(5-(((2R,3R,4R,5R,6R)- 3-acetamido-4,5-dihydroxy-6-(hydroxymethyl)tetrahydro-2H-py ran-2-yl)oxy)pentanamido)propyl)-2-((hydroxyl)methyl)-4-met hoxytetrahydrofuran-3-oxyl
tcttcgtattaagaagacta

SEQ ID NO: 1033 - RNA, 20 nt, synthetic construct
  source 1..20: mol_type = other RNA
  modified_base 1: mod_base = OTHER; note = 2'-O-methyl-uridine with phosphorothioate linkage
  modified_base 2: mod_base = OTHER; note = 2'-O-methyl-uridine with phosphorothioate linkage
  modified_base 3: mod_base = OTHER; note = 2'-O-methyl-cytidine
  modified_base 4: mod_base = OTHER; note = 2'-O-methyl-guanosine
  modified_base 5: mod_base = OTHER; note = 2'-O-methyl-uridine
  modified_base 6: mod_base = OTHER; note = 2'-fluoro-adenosine
  modified_base 7: mod_base = OTHER; note = 2'-O-methyl-uridine
  modified_base 8: mod_base = OTHER; note = 2'-fluoro-uridine
  modified_base 9: mod_base = OTHER; note = 2'-fluoro-adenosine
  modified_base 10: mod_base = OTHER; note = 2'-fluoro-adenosine
  modified_base 11: mod_base = OTHER; note = 2'-fluoro-guanosine
  modified_base 12: mod_base = OTHER; note = 2'-O-methyl-adenosine
  modified_base 13: mod_base = OTHER; note = 2'-O-methyl-adenosine
  modified_base 14: mod_base = OTHER; note = 2'-O-methyl-guanosine
  modified_base 15: mod_base = OTHER; note = 2'-O-methyl-adenosine
  modified_base 16: mod_base = OTHER; note = 2'-O-methyl-cytidine
  modified_base 17: mod_base = OTHER; note = 2'-O-methyl-uridine
  modified_base 18: mod_base = OTHER; note = 2'-O-methyl-adenosine with phosphorothioate linkage
  modified_base 19: mod_base = OTHER; note = 2'-O-methyl-uridine with phosphorothioate linkage
  modified_base 20: mod_base = OTHER; note = 2'-O-methyl-adenosine conjugated to 3 iterations of (2R,3R,4R,5S)-5-(3-(5-(((2R,3R,4R,5R,6R)- 3-acetamido-4,5-dihydroxy-6-(hydroxymethyl)tetrahydro-2H-py ran-2-yl)oxy)pentanamido)propyl)-2-((hydroxyl)methyl)-4-met hoxytetrahydrofuran-3-oxyl
ttcgtattaagaagactata

SEQ ID NO: 1034 - RNA, 20 nt, synthetic construct
  source 1..20: mol_type = other RNA
  modified_base 1: mod_base = OTHER; note = 2'-O-methyl-uridine with phosphorothioate linkage
  modified_base 2: mod_base = OTHER; note = 2'-O-methyl-cytidine with phosphorothioate linkage
  modified_base 3: mod_base = OTHER; note = 2'-O-methyl-guanosine
  modified_base 4: mod_base = OTHER; note = 2'-O-methyl-uridine
  modified_base 5: mod_base = OTHER; note = 2'-O-methyl-adenosine
  modified_base 6: mod_base = OTHER; note = 2'-fluoro-uridine
  modified_base 7: mod_base = OTHER; note = 2'-O-methyl-uridine
  modified_base 8: mod_base = OTHER; note = 2'-fluoro-adenosine
  modified_base 9: mod_base = OTHER; note = 2'-fluoro-adenosine
  modified_base 10: mod_base = OTHER; note = 2'-fluoro-guanosine
  modified_base 11: mod_base = OTHER; note = 2'-fluoro-adenosine
  modified_base 12: mod_base = OTHER; note = 2'-O-methyl-adenosine
  modified_base 13: mod_base = OTHER; note = 2'-O-methyl-guanosine
  modified_base 14: mod_base = OTHER; note = 2'-O-methyl-adenosine
  modified_base 15: mod_base = OTHER; note = 2'-O-methyl-cytidine
  modified_base 16: mod_base = OTHER; note = 2'-O-methyl-uridine
  modified_base 17: mod_base = OTHER; note = 2'-O-methyl-adenosine
  modified_base 18: mod_base = OTHER; note = 2'-O-methyl-uridine with phosphorothioate linkage
  modified_base 19: mod_base = OTHER; note = 2'-O-methyl-adenosine with phosphorothioate linkage
  modified_base 20: mod_base = OTHER; note = 2'-O-methyl-adenosine conjugated to 3 iterations of (2R,3R,4R,5S)-5-(3-(5-(((2R,3R,4R,5R,6R)- 3-acetamido-4,5-dihydroxy-6-(hydroxymethyl)tetrahydro-2H-py ran-2-yl)oxy)pentanamido)propyl)-2-((hydroxyl)methyl)-4-met hoxytetrahydrofuran-3-oxyl
tcgtattaagaagactataa

SEQ ID NO: 1035 - RNA, 20 nt, synthetic construct
  source 1..20: mol_type = other RNA
  modified_base 1: mod_base = OTHER; note = 2'-O-methyl-uridine with phosphorothioate linkage
  modified_base 2: mod_base = OTHER; note = 2'-O-methyl-uridine with phosphorothioate linkage
  modified_base 3: mod_base = OTHER; note = 2'-O-methyl-adenosine
  modified_base 4: mod_base = OTHER; note = 2'-O-methyl-adenosine
  modified_base 5: mod_base = OTHER; note = 2'-O-methyl-guanosine
  modified_base 6: mod_base = OTHER; note = 2'-fluoro-adenosine
  modified_base 7: mod_base = OTHER; note = 2'-O-methyl-adenosine
  modified_base 8: mod_base = OTHER; note = 2'-fluoro-guanosine
  modified_base 9: mod_base = OTHER; note = 2'-fluoro-adenosine
  modified_base 10: mod_base = OTHER; note = 2'-fluoro-cytidine
  modified_base 11: mod_base = OTHER; note = 2'-fluoro-uridine
  modified_base 12: mod_base = OTHER; note = 2'-O-methyl-adenosine
  modified_base 13: mod_base = OTHER; note = 2'-O-methyl-uridine
  modified_base 14: mod_base = OTHER; note = 2'-O-methyl-adenosine
  modified_base 15: mod_base = OTHER; note = 2'-O-methyl-uridine
  modified_base 16: mod_base = OTHER; note = 2'-O-methyl-cytidine
  modified_base 17: mod_base = OTHER; note = 2'-O-methyl-uridine
  modified_base 18: mod_base = OTHER; note = 2'-O-methyl-cytidine with phosphorothioate linkage
  modified_base 19: mod_base = OTHER; note = 2'-O-methyl-adenosine with phosphorothioate linkage
  modified_base 20: mod_base = OTHER; note = 2'-O-methyl-adenosine conjugated to 3 iterations of (2R,3R,4R,5S)-5-(3-(5-(((2R,3R,4R,5R,6R)- 3-acetamido-4,5-dihydroxy-6-(hydroxymethyl)tetrahydro-2H-py ran-2-yl)oxy)pentanamido)propyl)-2-((hydroxyl)methyl)-4-met hoxytetrahydrofuran-3-oxyl
ttaagaagactatatctcaa

SEQ ID NO: 1036 - RNA, 20 nt, synthetic construct
  source 1..20: mol_type = other RNA
  modified_base 1: mod_base = OTHER; note = 2'-O-methyl-uridine with phosphorothioate linkage
  modified_base 2: mod_base = OTHER; note = 2'-O-methyl-adenosine with phosphorothioate linkage
  modified_base 3: mod_base = OTHER; note = 2'-O-methyl-adenosine
  modified_base 4: mod_base = OTHER; note = 2'-O-methyl-guanosine
  modified_base 5: mod_base = OTHER; note = 2'-O-methyl-adenosine
  modified_base 6: mod_base = OTHER; note = 2'-fluoro-adenosine
  modified_base 7: mod_base = OTHER; note = 2'-O-methyl-guanosine
  modified_base 8: mod_base = OTHER; note = 2'-fluoro-adenosine
  modified_base 9: mod_base = OTHER; note = 2'-fluoro-cytidine
  modified_base 10: mod_base = OTHER; note = 2'-fluoro-uridine
  modified_base 11: mod_base = OTHER; note = 2'-fluoro-adenosine
  modified_base 12: mod_base = OTHER; note = 2'-O-methyl-uridine
  modified_base 13: mod_base = OTHER; note = 2'-O-methyl-adenosine
  modified_base 14: mod_base = OTHER; note = 2'-O-methyl-uridine
  modified_base 15: mod_base = OTHER; note = 2'-O-methyl-cytidine
  modified_base 16: mod_base = OTHER; note = 2'-O-methyl-uridine
  modified_base 17: mod_base = OTHER; note = 2'-O-methyl-cytidine
  modified_base 18: mod_base = OTHER; note = 2'-O-methyl-adenosine with phosphorothioate linkage
  modified_base 19: mod_base = OTHER; note = 2'-O-methyl-adenosine with phosphorothioate linkage
  modified_base 20: mod_base = OTHER; note = 2'-O-methyl-adenosine conjugated to 3 iterations of (2R,3R,4R,5S)-5-(3-(5-(((2R,3R,4R,5R,6R)- 3-acetamido-4,5-dihydroxy-6-(hydroxymethyl)tetrahydro-2H-py ran-2-yl)oxy)pentanamido)propyl)-2-((hydroxyl)methyl)-4-met hoxytetrahydrofuran-3-oxyl
taagaagactatatctcaaa

SEQ ID NO: 1037 - RNA, 20 nt, synthetic construct
  source 1..20: mol_type = other RNA
  modified_base 1: mod_base = OTHER; note = 2'-O-methyl-adenosine with phosphorothioate linkage
  modified_base 2: mod_base = OTHER; note = 2'-O-methyl-adenosine with phosphorothioate linkage
  modified_base 3: mod_base = OTHER; note = 2'-O-methyl-guanosine
  modified_base 4: mod_base = OTHER; note = 2'-O-methyl-adenosine
  modified_base 5: mod_base = OTHER; note = 2'-O-methyl-adenosine
  modified_base 6: mod_base = OTHER; note = 2'-fluoro-guanosine
  modified_base 7: mod_base = OTHER; note = 2'-O-methyl-adenosine
  modified_base 8: mod_base = OTHER; note = 2'-fluoro-cytidine
  modified_base 9: mod_base = OTHER; note = 2'-fluoro-uridine
  modified_base 10: mod_base = OTHER; note = 2'-fluoro-adenosine
  modified_base 11: mod_base = OTHER; note = 2'-fluoro-uridine
  modified_base 12: mod_base = OTHER; note = 2'-O-methyl-adenosine
  modified_base 13: mod_base = OTHER; note = 2'-O-methyl-uridine
  modified_base 14: mod_base = OTHER; note = 2'-O-methyl-cytidine
  modified_base 15: mod_base = OTHER; note = 2'-O-methyl-uridine
  modified_base 16: mod_base = OTHER; note = 2'-O-methyl-cytidine
  modified_base 17: mod_base = OTHER; note = 2'-O-methyl-adenosine
  modified_base 18: mod_base = OTHER; note = 2'-O-methyl-adenosine with phosphorothioate linkage
  modified_base 19: mod_base = OTHER; note = 2'-O-methyl-cytidine with phosphorothioate linkage
  modified_base 20: mod_base = OTHER; note = 2'-O-methyl-adenosine conjugated to 3 iterations of (2R,3R,4R,5S)-5-(3-(5-(((2R,3R,4R,5R,6R)- 3-acetamido-4,5-dihydroxy-6-(hydroxymethyl)tetrahydro-2H-py ran-2-yl)oxy)pentanamido)propyl)-2-((hydroxyl)methyl)-4-met hoxytetrahydrofuran-3-oxyl
aagaagactatatctcaaca

SEQ ID NO: 1038 - RNA, 20 nt, synthetic construct
  source 1..20: mol_type = other RNA
  modified_base 1: mod_base = OTHER; note = 2'-O-methyl-adenosine with phosphorothioate linkage
  modified_base 2: mod_base = OTHER; note = 2'-O-methyl-guanosine with phosphorothioate linkage
  modified_base 3: mod_base = OTHER; note = 2'-O-methyl-adenosine
  modified_base 4: mod_base = OTHER; note = 2'-O-methyl-adenosine
  modified_base 5: mod_base = OTHER; note = 2'-O-methyl-guanosine
  modified_base 6: mod_base = OTHER; note = 2'-fluoro-adenosine
  modified_base 7: mod_base = OTHER; note = 2'-O-methyl-cytidine
  modified_base 8: mod_base = OTHER; note = 2'-fluoro-uridine
  modified_base 9: mod_base = OTHER; note = 2'-fluoro-adenosine
  modified_base 10: mod_base = OTHER; note = 2'-fluoro-uridine
  modified_base 11: mod_base = OTHER; note = 2'-fluoro-adenosine
  modified_base 12: mod_base = OTHER; note = 2'-O-methyl-uridine
  modified_base 13: mod_base = OTHER; note = 2'-O-methyl-cytidine
  modified_base 14: mod_base = OTHER; note = 2'-O-methyl-uridine
  modified_base 15: mod_base = OTHER; note = 2'-O-methyl-cytidine
  modified_base 16: mod_base = OTHER; note = 2'-O-methyl-adenosine
  modified_base 17: mod_base = OTHER; note = 2'-O-methyl-adenosine
  modified_base 18: mod_base = OTHER; note = 2'-O-methyl-cytidine with phosphorothioate linkage
  modified_base 19: mod_base = OTHER; note = 2'-O-methyl-uridine with phosphorothioate linkage
  modified_base 20: mod_base = OTHER; note = 2'-O-methyl-adenosine conjugated to 3 iterations of (2R,3R,4R,5S)-5-(3-(5-(((2R,3R,4R,5R,6R)- 3-acetamido-4,5-dihydroxy-6-(hydroxymethyl)tetrahydro-2H-py ran-2-yl)oxy)pentanamido)propyl)-2-((hydroxyl)methyl)-4-met hoxytetrahydrofuran-3-oxyl
agaagactatatctcaacta

SEQ ID NO: 1039 - RNA, 20 nt, synthetic construct
  source 1..20: mol_type = other RNA
  modified_base 1: mod_base = OTHER; note = 2'-O-methyl-adenosine with phosphorothioate linkage
  modified_base 2: mod_base = OTHER; note = 2'-O-methyl-adenosine with phosphorothioate linkage
  modified_base 3: mod_base = OTHER; note = 2'-O-methyl-guanosine
  modified_base 4: mod_base = OTHER; note = 2'-O-methyl-adenosine
  modified_base 5: mod_base = OTHER; note = 2'-O-methyl-cytidine
  modified_base 6: mod_base = OTHER; note = 2'-fluoro-uridine
  modified_base 7: mod_base = OTHER; note = 2'-O-methyl-adenosine
  modified_base 8: mod_base = OTHER; note = 2'-fluoro-uridine
  modified_base 9: mod_base = OTHER; note = 2'-fluoro-adenosine
  modified_base 10: mod_base = OTHER; note = 2'-fluoro-uridine
  modified_base 11: mod_base = OTHER; note = 2'-fluoro-cytidine
  modified_base 12: mod_base = OTHER; note = 2'-O-methyl-uridine
  modified_base 13: mod_base = OTHER; note = 2'-O-methyl-cytidine
  modified_base 14: mod_base = OTHER; note = 2'-O-methyl-adenosine
  modified_base 15: mod_base = OTHER; note = 2'-O-methyl-adenosine
  modified_base 16: mod_base = OTHER; note = 2'-O-methyl-cytidine
  modified_base 17: mod_base = OTHER; note = 2'-O-methyl-uridine
  modified_base 18: mod_base = OTHER; note = 2'-O-methyl-uridine with phosphorothioate linkage
  modified_base 19: mod_base = OTHER; note = 2'-O-methyl-uridine with phosphorothioate linkage
  modified_base 20: mod_base = OTHER; note = 2'-O-methyl-adenosine conjugated to 3 iterations of (2R,3R,4R,5S)-5-(3-(5-(((2R,3R,4R,5R,6R)- 3-acetamido-4,5-dihydroxy-6-(hydroxymethyl)tetrahydro-2H-py ran-2-yl)oxy)pentanamido)propyl)-2-((hydroxyl)methyl)-4-met hoxytetrahydrofuran-3-oxyl
aagactatatctcaacttta

SEQ ID NO: 1040 - RNA, 20 nt, synthetic construct
  source 1..20: mol_type = other RNA
  modified_base 1: mod_base = OTHER; note = 2'-O-methyl-adenosine with phosphorothioate linkage
  modified_base 2: mod_base = OTHER; note = 2'-O-methyl-guanosine with phosphorothioate linkage
  modified_base 3: mod_base = OTHER; note = 2'-O-methyl-adenosine
  modified_base 4: mod_base = OTHER; note = 2'-O-methyl-cytidine
  modified_base 5: mod_base = OTHER; note = 2'-O-methyl-uridine
  modified_base 6: mod_base = OTHER; note = 2'-fluoro-adenosine
  modified_base 7: mod_base = OTHER; note = 2'-O-methyl-uridine
  modified_base 8: mod_base = OTHER; note = 2'-fluoro-adenosine
  modified_base 9: mod_base = OTHER; note = 2'-fluoro-uridine
  modified_base 10: mod_base = OTHER; note = 2'-fluoro-cytidine
  modified_base 11: mod_base = OTHER; note = 2'-fluoro-uridine
  modified_base 12: mod_base = OTHER; note = 2'-O-methyl-cytidine
  modified_base 13: mod_base = OTHER; note = 2'-O-methyl-adenosine
  modified_base 14: mod_base = OTHER; note = 2'-O-methyl-adenosine
  modified_base 15: mod_base = OTHER; note = 2'-O-methyl-cytidine
  modified_base 16: mod_base = OTHER; note = 2'-O-methyl-uridine
  modified_base 17: mod_base = OTHER; note = 2'-O-methyl-uridine
  modified_base 18: mod_base = OTHER; note = 2'-O-methyl-uridine with phosphorothioate linkage
  modified_base 19: mod_base = OTHER; note = 2'-O-methyl-guanosine with phosphorothioate linkage
  modified_base 20: mod_base = OTHER; note = 2'-O-methyl-adenosine conjugated to 3 iterations of (2R,3R,4R,5S)-5-(3-(5-(((2R,3R,4R,5R,6R)- 3-acetamido-4,5-dihydroxy-6-(hydroxymethyl)tetrahydro-2H-py ran-2-yl)oxy)pentanamido)propyl)-2-((hydroxyl)methyl)-4-met hoxytetrahydrofuran-3-oxyl
agactatatctcaactttga

SEQ ID NO: 1041 - RNA, 20 nt, synthetic construct
  source 1..20: mol_type = other RNA
  modified_base 1: mod_base = OTHER; note = 2'-O-methyl-adenosine with phosphorothioate linkage
  modified_base 2: mod_base = OTHER; note = 2'-O-methyl-cytidine with phosphorothioate linkage
  modified_base 3: mod_base = OTHER; note = 2'-O-methyl-uridine
  modified_base 4: mod_base = OTHER; note = 2'-O-methyl-adenosine
  modified_base 5: mod_base = OTHER; note = 2'-O-methyl-uridine
  modified_base 6: mod_base = OTHER; note = 2'-fluoro-adenosine
  modified_base 7: mod_base = OTHER; note = 2'-O-methyl-uridine
  modified_base 8: mod_base = OTHER; note = 2'-fluoro-cytidine
  modified_base 9: mod_base = OTHER; note = 2'-fluoro-uridine
  modified_base 10: mod_base = OTHER; note = 2'-fluoro-cytidine
  modified_base 11: mod_base = OTHER; note = 2'-fluoro-adenosine
  modified_base 12: mod_base = OTHER; note = 2'-O-methyl-adenosine
  modified_base 13: mod_base = OTHER; note = 2'-O-methyl-cytidine
  modified_base 14: mod_base = OTHER; note = 2'-O-methyl-uridine
  modified_base 15: mod_base = OTHER; note = 2'-O-methyl-uridine
  modified_base 16: mod_base = OTHER; note = 2'-O-methyl-uridine
  modified_base 17: mod_base = OTHER; note = 2'-O-methyl-guanosine
  modified_base 18: mod_base = OTHER; note = 2'-O-methyl-uridine with phosphorothioate linkage
  modified_base 19: mod_base = OTHER; note = 2'-O-methyl-guanosine with phosphorothioate linkage
  modified_base 20: mod_base = OTHER; note = 2'-O-methyl-adenosine conjugated to 3 iterations of (2R,3R,4R,5S)-5-(3-(5-(((2R,3R,4R,5R,6R)- 3-acetamido-4,5-dihydroxy-6-(hydroxymethyl)tetrahydro-2H-py ran-2-yl)oxy)pentanamido)propyl)-2-((hydroxyl)methyl)-4-met hoxytetrahydrofuran-3-oxyl
actatatctcaactttgtga

SEQ ID NO: 1042 - RNA, 20 nt, synthetic construct
  source 1..20: mol_type = other RNA
  modified_base 1: mod_base = OTHER; note = 2'-O-methyl-uridine with phosphorothioate linkage
  modified_base 2: mod_base = OTHER; note = 2'-O-methyl-adenosine with phosphorothioate linkage
  modified_base 3: mod_base = OTHER; note = 2'-O-methyl-uridine
  modified_base 4: mod_base = OTHER; note = 2'-O-methyl-adenosine
  modified_base 5: mod_base = OTHER; note = 2'-O-methyl-uridine
  modified_base 6: mod_base = OTHER; note = 2'-fluoro-cytidine
  modified_base 7: mod_base = OTHER; note = 2'-O-methyl-uridine
  modified_base 8: mod_base = OTHER; note = 2'-fluoro-cytidine
  modified_base 9: mod_base = OTHER; note = 2'-fluoro-adenosine
  modified_base 10: mod_base = OTHER; note = 2'-fluoro-adenosine
  modified_base 11: mod_base = OTHER; note = 2'-fluoro-cytidine
  modified_base 12: mod_base = OTHER; note = 2'-O-methyl-uridine
  modified_base 13: mod_base = OTHER; note = 2'-O-methyl-uridine
  modified_base 14: mod_base = OTHER; note = 2'-O-methyl-uridine
  modified_base 15: mod_base = OTHER; note = 2'-O-methyl-guanosine
  modified_base 16: mod_base = OTHER; note = 2'-O-methyl-uridine
  modified_base 17: mod_base = OTHER; note = 2'-O-methyl-guanosine
  modified_base 18: mod_base = OTHER; note = 2'-O-methyl-uridine with phosphorothioate linkage
  modified_base 19: mod_base = OTHER; note = 2'-O-methyl-cytidine with phosphorothioate linkage
  modified_base 20: mod_base = OTHER; note = 2'-O-methyl-adenosine conjugated to 3 iterations of (2R,3R,4R,5S)-5-(3-(5-(((2R,3R,4R,5R,6R)- 3-acetamido-4,5-dihydroxy-6-(hydroxymethyl)tetrahydro-2H-py ran-2-yl)oxy)pentanamido)propyl)-2-((hydroxyl)methyl)-4-met hoxytetrahydrofuran-3-oxyl
tatatctcaactttgtgtca

SEQ ID NO: 1043 - RNA, 20 nt, synthetic construct
  source 1..20: mol_type = other RNA
  modified_base 1: mod_base = OTHER; note = 2'-O-methyl-uridine with phosphorothioate linkage
  modified_base 2: mod_base = OTHER; note = 2'-O-methyl-uridine with phosphorothioate linkage
  modified_base 3: mod_base = OTHER; note = 2'-O-methyl-uridine
  modified_base 4: mod_base = OTHER; note = 2'-O-methyl-guanosine
  modified_base 5: mod_base = OTHER; note = 2'-O-methyl-uridine
  modified_base 6: mod_base = OTHER; note = 2'-fluoro-guanosine
  modified_base 7: mod_base = OTHER; note = 2'-O-methyl-uridine
  modified_base 8: mod_base = OTHER; note = 2'-fluoro-cytidine
  modified_base 9: mod_base = OTHER; note = 2'-fluoro-adenosine
  modified_base 10: mod_base = OTHER; note = 2'-fluoro-adenosine
  modified_base 11: mod_base = OTHER; note = 2'-fluoro-adenosine
  modified_base 12: mod_base = OTHER; note = 2'-O-methyl-guanosine
  modified_base 13: mod_base = OTHER; note = 2'-O-methyl-adenosine
  modified_base 14: mod_base = OTHER; note = 2'-O-methyl-adenosine
  modified_base 15: mod_base = OTHER; note = 2'-O-methyl-guanosine
  modified_base 16: mod_base = OTHER; note = 2'-O-methyl-adenosine
  modified_base 17: mod_base = OTHER; note = 2'-O-methyl-cytidine
  modified_base 18: mod_base = OTHER; note = 2'-O-methyl-uridine with phosphorothioate linkage
  modified_base 19: mod_base = OTHER; note = 2'-O-methyl-guanosine with phosphorothioate linkage
  modified_base 20: mod_base = OTHER; note = 2'-O-methyl-adenosine conjugated to 3 iterations of (2R,3R,4R,5S)-5-(3-(5-(((2R,3R,4R,5R,6R)- 3-acetamido-4,5-dihydroxy-6-(hydroxymethyl)tetrahydro-2H-py ran-2-yl)oxy)pentanamido)propyl)-2-((hydroxyl)methyl)-4-met hoxytetrahydrofuran-3-oxyl
tttgtgtcaaagaagactga

SEQ ID NO: 1044 - RNA, 20 nt, synthetic construct
  source 1..20: mol_type = other RNA
  modified_base 1: mod_base = OTHER; note = 2'-O-methyl-uridine with phosphorothioate linkage
  modified_base 2: mod_base = OTHER; note = 2'-O-methyl-uridine with phosphorothioate linkage
  modified_base 3: mod_base = OTHER; note = 2'-O-methyl-guanosine
  modified_base 4: mod_base = OTHER; note = 2'-O-methyl-uridine
  modified_base 5: mod_base = OTHER; note = 2'-O-methyl-guanosine
  modified_base 6: mod_base = OTHER; note = 2'-fluoro-uridine
  modified_base 7: mod_base = OTHER; note = 2'-O-methyl-cytidine
  modified_base 8: mod_base = OTHER; note = 2'-fluoro-adenosine
  modified_base 9: mod_base = OTHER; note = 2'-fluoro-adenosine
  modified_base 10: mod_base = OTHER; note = 2'-fluoro-adenosine
  modified_base 11: mod_base = OTHER; note = 2'-fluoro-guanosine
  modified_base 12: mod_base = OTHER; note = 2'-O-methyl-adenosine
  modified_base 13: mod_base = OTHER; note = 2'-O-methyl-adenosine
  modified_base 14: mod_base = OTHER; note = 2'-O-methyl-guanosine
  modified_base 15: mod_base = OTHER; note = 2'-O-methyl-adenosine
  modified_base 16: mod_base = OTHER; note = 2'-O-methyl-cytidine
  modified_base 17: mod_base = OTHER; note = 2'-O-methyl-uridine
  modified_base 18: mod_base = OTHER; note = 2'-O-methyl-guanosine with phosphorothioate linkage
  modified_base 19: mod_base = OTHER; note = 2'-O-methyl-cytidine with phosphorothioate linkage
  modified_base 20: mod_base = OTHER; note = 2'-O-methyl-adenosine conjugated to 3 iterations of (2R,3R,4R,5S)-5-(3-(5-(((2R,3R,4R,5R,6R)- 3-acetamido-4,5-dihydroxy-6-(hydroxymethyl)tetrahydro-2H-py ran-2-yl)oxy)pentanamido)propyl)-2-((hydroxyl)methyl)-4-met hoxytetrahydrofuran-3-oxyl
ttgtgtcaaagaagactgca

SEQ ID NO: 1045 - RNA, 20 nt, synthetic construct
  source 1..20: mol_type = other RNA
  modified_base 1: mod_base = OTHER; note = 2'-O-methyl-guanosine with phosphorothioate linkage
  modified_base 2: mod_base = OTHER; note = 2'-O-methyl-uridine with phosphorothioate linkage
  modified_base 3: mod_base = OTHER; note = 2'-O-methyl-guanosine
  modified_base 4: mod_base = OTHER; note = 2'-O-methyl-uridine
  modified_base 5: mod_base = OTHER; note = 2'-O-methyl-cytidine
  modified_base 6: mod_base = OTHER; note = 2'-fluoro-adenosine
  modified_base 7: mod_base = OTHER; note = 2'-O-methyl-adenosine
  modified_base 8: mod_base = OTHER; note = 2'-fluoro-adenosine
  modified_base 9: mod_base = OTHER; note = 2'-fluoro-guanosine
  modified_base 10: mod_base = OTHER; note = 2'-fluoro-adenosine
  modified_base 11: mod_base = OTHER; note = 2'-fluoro-adenosine
  modified_base 12: mod_base = OTHER; note = 2'-O-methyl-guanosine
  modified_base 13: mod_base = OTHER; note = 2'-O-methyl-adenosine
  modified_base 14: mod_base = OTHER; note = 2'-O-methyl-cytidine
  modified_base 15: mod_base = OTHER; note = 2'-O-methyl-uridine
  modified_base 16: mod_base = OTHER; note = 2'-O-methyl-guanosine
  modified_base 17: mod_base = OTHER; note = 2'-O-methyl-cytidine
  modified_base 18: mod_base = OTHER; note = 2'-O-methyl-adenosine with phosphorothioate linkage
  modified_base 19: mod_base = OTHER; note = 2'-O-methyl-adenosine with phosphorothioate linkage
  modified_base 20: mod_base = OTHER; note = 2'-O-methyl-adenosine conjugated to 3 iterations of (2R,3R,4R,5S)-5-(3-(5-(((2R,3R,4R,5R,6R)- 3-acetamido-4,5-dihydroxy-6-(hydroxymethyl)tetrahydro-2H-py ran-2-yl)oxy)pentanamido)propyl)-2-((hydroxyl)methyl)-4-met hoxytetrahydrofuran-3-oxyl
gtgtcaaagaagactgcaaa

SEQ ID NO: 1046 - RNA, 20 nt, synthetic construct
  source 1..20: mol_type = other RNA
  modified_base 1: mod_base = OTHER; note = 2'-O-methyl-uridine with phosphorothioate linkage
  modified_base 2: mod_base = OTHER; note = 2'-O-methyl-guanosine with phosphorothioate linkage
  modified_base 3: mod_base = OTHER; note = 2'-O-methyl-uridine
  modified_base 4: mod_base = OTHER; note = 2'-O-methyl-cytidine
  modified_base 5: mod_base = OTHER; note = 2'-O-methyl-adenosine
  modified_base 6: mod_base = OTHER; note = 2'-fluoro-adenosine
  modified_base 7: mod_base = OTHER; note = 2'-O-methyl-adenosine
  modified_base 8: mod_base = OTHER; note = 2'-fluoro-guanosine
  modified_base 9: mod_base = OTHER; note = 2'-fluoro-adenosine
  modified_base 10: mod_base = OTHER; note = 2'-fluoro-adenosine
  modified_base 11: mod_base = OTHER; note = 2'-fluoro-guanosine
  modified_base 12: mod_base = OTHER; note = 2'-O-methyl-adenosine
  modified_base 13: mod_base = OTHER; note = 2'-O-methyl-cytidine
  modified_base 14: mod_base = OTHER; note = 2'-O-methyl-uridine
  modified_base 15: mod_base = OTHER; note = 2'-O-methyl-guanosine
  modified_base 16: mod_base = OTHER; note = 2'-O-methyl-cytidine
  modified_base 17: mod_base = OTHER; note = 2'-O-methyl-adenosine
  modified_base 18: mod_base = OTHER; note = 2'-O-methyl-adenosine with phosphorothioate linkage
  modified_base 19: mod_base = OTHER; note = 2'-O-methyl-adenosine with phosphorothioate linkage
  modified_base 20: mod_base = OTHER; note = 2'-O-methyl-adenosine conjugated to 3 iterations of (2R,3R,4R,5S)-5-(3-(5-(((2R,3R,4R,5R,6R)- 3-acetamido-4,5-dihydroxy-6-(hydroxymethyl)tetrahydro-2H-py ran-2-yl)oxy)pentanamido)propyl)-2-((hydroxyl)methyl)-4-met hoxytetrahydrofuran-3-oxyl
tgtcaaagaagactgcaaaa

SEQ ID NO: 1047 - RNA, 20 nt, synthetic construct
  source 1..20: mol_type = other RNA
  modified_base 1: mod_base = OTHER; note = 2'-O-methyl-guanosine with phosphorothioate linkage
  modified_base 2: mod_base = OTHER; note = 2'-O-methyl-adenosine with phosphorothioate linkage
  modified_base 3: mod_base = OTHER; note = 2'-O-methyl-adenosine
  modified_base 4: mod_base = OTHER; note = 2'-O-methyl-guanosine
  modified_base 5: mod_base = OTHER; note = 2'-O-methyl-adenosine
  modified_base 6: mod_base = OTHER; note = 2'-fluoro-cytidine
  modified_base 7: mod_base = OTHER; note = 2'-O-methyl-uridine
  modified_base 8: mod_base = OTHER; note = 2'-fluoro-guanosine
  modified_base 9: mod_base = OTHER; note = 2'-fluoro-cytidine
  modified_base 10: mod_base = OTHER; note = 2'-fluoro-adenosine
  modified_base 11: mod_base = OTHER; note = 2'-fluoro-adenosine
  modified_base 12: mod_base = OTHER; note = 2'-O-methyl-adenosine
  modified_base 13: mod_base = OTHER; note = 2'-O-methyl-guanosine
  modified_base 14: mod_base = OTHER; note = 2'-O-methyl-cytidine
  modified_base 15: mod_base = OTHER; note = 2'-O-methyl-cytidine
  modified_base 16: mod_base = OTHER; note = 2'-O-methyl-uridine
  modified_base 17: mod_base = OTHER; note = 2'-O-methyl-adenosine
  modified_base 18: mod_base = OTHER; note = 2'-O-methyl-adenosine with phosphorothioate linkage
  modified_base 19: mod_base = OTHER; note = 2'-O-methyl-uridine with phosphorothioate linkage
  modified_base 20: mod_base = OTHER; note = 2'-O-methyl-adenosine conjugated to 3 iterations of (2R,3R,4R,5S)-5-(3-(5-(((2R,3R,4R,5R,6R)- 3-acetamido-4,5-dihydroxy-6-(hydroxymethyl)tetrahydro-2H-py ran-2-yl)oxy)pentanamido)propyl)-2-((hydroxyl)methyl)-4-met hoxytetrahydrofuran-3-oxyl
gaagactgcaaagcctaata

SEQ ID NO: 1048 - RNA, 20 nt, synthetic construct
  source 1..20: mol_type = other RNA
  modified_base 1: mod_base = OTHER; note = 2'-O-methyl-adenosine with phosphorothioate linkage
  modified_base 2: mod_base = OTHER; note = 2'-O-methyl-adenosine with phosphorothioate linkage
  modified_base 3: mod_base = OTHER; note = 2'-O-methyl-guanosine
  modified_base 4: mod_base = OTHER; note = 2'-O-methyl-adenosine
  modified_base 5: mod_base = OTHER; note = 2'-O-methyl-cytidine
  modified_base 6: mod_base = OTHER; note = 2'-fluoro-uridine
  modified_base 7: mod_base = OTHER; note = 2'-O-methyl-guanosine
  modified_base 8: mod_base = OTHER; note = 2'-fluoro-cytidine
  modified_base 9: mod_base = OTHER; note = 2'-fluoro-adenosine
  modified_base 10: mod_base = OTHER; note = 2'-fluoro-adenosine
  modified_base 11: mod_base = OTHER; note = 2'-fluoro-adenosine
  modified_base 12: mod_base = OTHER; note = 2'-O-methyl-guanosine
  modified_base 13: mod_base = OTHER; note = 2'-O-methyl-cytidine
  modified_base 14: mod_base = OTHER; note = 2'-O-methyl-cytidine
  modified_base 15: mod_base = OTHER; note = 2'-O-methyl-uridine
  modified_base 16: mod_base = OTHER; note = 2'-O-methyl-adenosine
  modified_base 17: mod_base = OTHER; note = 2'-O-methyl-adenosine
  modified_base 18: mod_base = OTHER; note = 2'-O-methyl-uridine with phosphorothioate linkage
  modified_base 19: mod_base = OTHER; note = 2'-O-methyl-guanosine with phosphorothioate linkage
  modified_base 20: mod_base = OTHER; note = 2'-O-methyl-adenosine conjugated to 3 iterations of (2R,3R,4R,5S)-5-(3-(5-(((2R,3R,4R,5R,6R)- 3-acetamido-4,5-dihydroxy-6-(hydroxymethyl)tetrahydro-2H-py ran-2-yl)oxy)pentanamido)propyl)-2-((hydroxyl)methyl)-4-met hoxytetrahydrofuran-3-oxyl
aagactgcaaagcctaatga

SEQ ID NO: 1049 - RNA, 20 nt, synthetic construct
  source 1..20: mol_type = other RNA
  modified_base 1: mod_base = OTHER; note = 2'-O-methyl-adenosine with phosphorothioate linkage
  modified_base 2: mod_base = OTHER; note = 2'-O-methyl-guanosine with phosphorothioate linkage
  modified_base 3: mod_base = OTHER; note = 2'-O-methyl-adenosine
  modified_base 4: mod_base = OTHER; note = 2'-O-methyl-cytidine
  modified_base 5: mod_base = OTHER; note = 2'-O-methyl-uridine
  modified_base 6: mod_base = OTHER; note = 2'-fluoro-guanosine
  modified_base 7: mod_base = OTHER; note = 2'-O-methyl-cytidine
  modified_base 8: mod_base = OTHER; note = 2'-fluoro-adenosine
  modified_base 9: mod_base = OTHER; note = 2'-fluoro-adenosine
  modified_base 10: mod_base = OTHER; note = 2'-fluoro-adenosine
  modified_base 11: mod_base = OTHER; note = 2'-fluoro-guanosine
  modified_base 12: mod_base = OTHER; note = 2'-O-methyl-cytidine
  modified_base 13: mod_base = OTHER; note = 2'-O-methyl-cytidine
  modified_base 14: mod_base = OTHER; note = 2'-O-methyl-uridine
  modified_base 15: mod_base = OTHER; note = 2'-O-methyl-adenosine
  modified_base 16: mod_base = OTHER; note = 2'-O-methyl-adenosine
  modified_base 17: mod_base = OTHER; note = 2'-O-methyl-uridine
  modified_base 18: mod_base = OTHER; note = 2'-O-methyl-guanosine with phosphorothioate linkage
  modified_base 19: mod_base = OTHER; note = 2'-O-methyl-adenosine with phosphorothioate linkage
  modified_base 20: mod_base = OTHER; note = 2'-O-methyl-adenosine conjugated to 3 iterations of (2R,3R,4R,5S)-5-(3-(5-(((2R,3R,4R,5R,6R)- 3-acetamido-4,5-dihydroxy-6-(hydroxymethyl)tetrahydro-2H-py ran-2-yl)oxy)pentanamido)propyl)-2-((hydroxyl)methyl)-4-met hoxytetrahydrofuran-3-oxyl
agactgcaaagcctaatgaa

SEQ ID NO: 1050 - RNA, 20 nt, synthetic construct
  source 1..20: mol_type = other RNA
  modified_base 1: mod_base = OTHER; note = 2'-O-methyl-adenosine with phosphorothioate linkage
  modified_base 2: mod_base = OTHER; note = 2'-O-methyl-cytidine with phosphorothioate linkage
  modified_base 3: mod_base = OTHER; note = 2'-O-methyl-uridine
  modified_base 4: mod_base = OTHER; note = 2'-O-methyl-guanosine
  modified_base 5: mod_base = OTHER; note = 2'-O-methyl-cytidine
  modified_base 6: mod_base = OTHER; note = 2'-fluoro-adenosine
  modified_base 7: mod_base = OTHER; note = 2'-O-methyl-adenosine
  modified_base 8: mod_base = OTHER; note = 2'-fluoro-adenosine
  modified_base 9: mod_base = OTHER; note = 2'-fluoro-guanosine
  modified_base 10: mod_base = OTHER; note = 2'-fluoro-cytidine
  modified_base 11: mod_base = OTHER; note = 2'-fluoro-cytidine
  modified_base 12: mod_base = OTHER; note = 2'-O-methyl-uridine
  modified_base 13: mod_base = OTHER; note = 2'-O-methyl-adenosine
  modified_base 14: mod_base = OTHER; note = 2'-O-methyl-adenosine
  modified_base 15: mod_base = OTHER; note = 2'-O-methyl-uridine
  modified_base 16: mod_base = OTHER; note = 2'-O-methyl-guanosine
  modified_base 17: mod_base = OTHER; note = 2'-O-methyl-adenosine
  modified_base 18: mod_base = OTHER; note = 2'-O-methyl-uridine with phosphorothioate linkage
  modified_base 19: mod_base = OTHER; note = 2'-O-methyl-guanosine with phosphorothioate linkage
  modified_base 20: mod_base = OTHER; note = 2'-O-methyl-adenosine conjugated to 3 iterations of (2R,3R,4R,5S)-5-(3-(5-(((2R,3R,4R,5R,6R)- 3-acetamido-4,5-dihydroxy-6-(hydroxymethyl)tetrahydro-2H-py ran-2-yl)oxy)pentanamido)propyl)-2-((hydroxyl)methyl)-4-met hoxytetrahydrofuran-3-oxyl
actgcaaagcctaatgatga

SEQ ID NO: 1051 - RNA, 20 nt, synthetic construct
  source 1..20: mol_type = other RNA
  modified_base 1: mod_base = OTHER; note = 2'-O-methyl-cytidine with phosphorothioate linkage
  modified_base 2: mod_base = OTHER; note = 2'-O-methyl-uridine with phosphorothioate linkage
  modified_base 3: mod_base = OTHER; note = 2'-O-methyl-guanosine
  modified_base 4: mod_base = OTHER; note = 2'-O-methyl-cytidine
  modified_base 5: mod_base = OTHER; note = 2'-O-methyl-adenosine
  modified_base 6: mod_base = OTHER; note = 2'-fluoro-adenosine
  modified_base 7: mod_base = OTHER; note = 2'-O-methyl-adenosine
  modified_base 8: mod_base = OTHER; note = 2'-fluoro-guanosine
  modified_base 9: mod_base = OTHER; note = 2'-fluoro-cytidine
  modified_base 10: mod_base = OTHER; note = 2'-fluoro-cytidine
  modified_base 11: mod_base = OTHER; note = 2'-fluoro-uridine
  modified_base 12: mod_base = OTHER; note = 2'-O-methyl-adenosine
  modified_base 13: mod_base = OTHER; note = 2'-O-methyl-adenosine
  modified_base 14: mod_base = OTHER; note = 2'-O-methyl-uridine
  modified_base 15: mod_base = OTHER; note = 2'-O-methyl-guanosine
  modified_base 16: mod_base = OTHER; note = 2'-O-methyl-adenosine
  modified_base 17: mod_base = OTHER; note = 2'-O-methyl-uridine
  modified_base 18: mod_base = OTHER; note = 2'-O-methyl-guanosine with phosphorothioate linkage
  modified_base 19: mod_base = OTHER; note = 2'-O-methyl-adenosine with phosphorothioate linkage
  modified_base 20: mod_base = OTHER; note = 2'-O-methyl-adenosine conjugated to 3 iterations of (2R,3R,4R,5S)-5-(3-(5-(((2R,3R,4R,5R,6R)- 3-acetamido-4,5-dihydroxy-6-(hydroxymethyl)tetrahydro-2H-py ran-2-yl)oxy)pentanamido)propyl)-2-((hydroxyl)methyl)-4-met hoxytetrahydrofuran-3-oxyl
ctgcaaagcctaatgatgaa

SEQ ID NO: 1052 - RNA, 20 nt, synthetic construct
  source 1..20: mol_type = other RNA
  modified_base 1: mod_base = OTHER; note = 2'-O-methyl-uridine with phosphorothioate linkage
  modified_base 2: mod_base = OTHER; note = 2'-O-methyl-guanosine with phosphorothioate linkage
  modified_base 3: mod_base = OTHER; note = 2'-O-methyl-cytidine
  modified_base 4: mod_base = OTHER; note = 2'-O-methyl-adenosine
  modified_base 5: mod_base = OTHER; note = 2'-O-methyl-adenosine
  modified_base 6: mod_base = OTHER; note = 2'-fluoro-adenosine
  modified_base 7: mod_base = OTHER; note = 2'-O-methyl-guanosine
  modified_base 8: mod_base = OTHER; note = 2'-fluoro-cytidine
  modified_base 9: mod_base = OTHER; note = 2'-fluoro-cytidine
  modified_base 10: mod_base = OTHER; note = 2'-fluoro-uridine
  modified_base 11: mod_base = OTHER; note = 2'-fluoro-adenosine
  modified_base 12: mod_base = OTHER; note = 2'-O-methyl-adenosine
  modified_base 13: mod_base = OTHER; note = 2'-O-methyl-uridine
  modified_base 14: mod_base = OTHER; note = 2'-O-methyl-guanosine
  modified_base 15: mod_base = OTHER; note = 2'-O-methyl-adenosine
  modified_base 16: mod_base = OTHER; note = 2'-O-methyl-uridine
  modified_base 17: mod_base = OTHER; note = 2'-O-methyl-guanosine
  modified_base 18: mod_base = OTHER; note = 2'-O-methyl-adenosine with phosphorothioate linkage
  modified_base 19: mod_base = OTHER; note = 2'-O-methyl-uridine with phosphorothioate linkage
  modified_base 20: mod_base = OTHER; note = 2'-O-methyl-adenosine conjugated to 3 iterations of (2R,3R,4R,5S)-5-(3-(5-(((2R,3R,4R,5R,6R)- 3-acetamido-4,5-dihydroxy-6-(hydroxymethyl)tetrahydro-2H-py ran-2-yl)oxy)pentanamido)propyl)-2-((hydroxyl)methyl)-4-met hoxytetrahydrofuran-3-oxyl
tgcaaagcctaatgatgata

SEQ ID NO: 1053 - RNA, 20 nt, synthetic construct
  source 1..20: mol_type = other RNA
  modified_base 1: mod_base = OTHER; note = 2'-O-methyl-adenosine with phosphorothioate linkage
  modified_base 2: mod_base = OTHER; note = 2'-O-methyl-guanosine with phosphorothioate linkage
  modified_base 3: mod_base = OTHER; note = 2'-O-methyl-uridine
  modified_base 4: mod_base = OTHER; note = 2'-O-methyl-uridine
  modified_base 5: mod_base = OTHER; note = 2'-O-methyl-adenosine
  modified_base 6: mod_base = OTHER; note = 2'-fluoro-guanosine
  modified_base 7: mod_base = OTHER; note = 2'-O-methyl-cytidine
  modified_base 8: mod_base = OTHER; note = 2'-fluoro-adenosine
  modified_base 9: mod_base = OTHER; note = 2'-fluoro-guanosine
  modified_base 10: mod_base = OTHER; note = 2'-fluoro-guanosine
  modified_base 11: mod_base = OTHER; note = 2'-fluoro-adenosine
  modified_base 12: mod_base = OTHER; note = 2'-O-methyl-cytidine
  modified_base 13: mod_base = OTHER; note = 2'-O-methyl-uridine
  modified_base 14: mod_base = OTHER; note = 2'-O-methyl-uridine
  modified_base 15: mod_base = OTHER; note = 2'-O-methyl-uridine
  modified_base 16: mod_base = OTHER; note = 2'-O-methyl-uridine
  modified_base 17: mod_base = OTHER; note = 2'-O-methyl-uridine
  modified_base 18: mod_base = OTHER; note = 2'-O-methyl-adenosine with phosphorothioate linkage
  modified_base 19: mod_base = OTHER; note = 2'-O-methyl-adenosine with phosphorothioate linkage
  modified_base 20: mod_base = OTHER; note = 2'-O-methyl-adenosine conjugated to 3 iterations of (2R,3R,4R,5S)-5-(3-(5-(((2R,3R,4R,5R,6R)- 3-acetamido-4,5-dihydroxy-6-(hydroxymethyl)tetrahydro-2H-py ran-2-yl)oxy)pentanamido)propyl)-2-((hydroxyl)methyl)-4-met hoxytetrahydrofuran-3-oxyl
agttagcaggactttttaaa

SEQ ID NO: 1054 - RNA, 20 nt, synthetic construct
  source 1..20: mol_type = other RNA
  modified_base 1: mod_base = OTHER; note = 2'-O-methyl-guanosine with phosphorothioate linkage
  modified_base 2: mod_base = OTHER; note = 2'-O-methyl-uridine with phosphorothioate linkage
  modified_base 3: mod_base = OTHER; note = 2'-O-methyl-cytidine
  modified_base 4: mod_base = OTHER; note = 2'-O-methyl-cytidine
  modified_base 5: mod_base = OTHER; note = 2'-O-methyl-cytidine
  modified_base 6: mod_base = OTHER; note = 2'-fluoro-uridine
  modified_base 7: mod_base = OTHER; note = 2'-O-methyl-adenosine
  modified_base 8: mod_base = OTHER; note = 2'-fluoro-uridine
  modified_base 9: mod_base = OTHER; note = 2'-fluoro-uridine
  modified_base 10: mod_base = OTHER; note = 2'-fluoro-uridine
  modified_base 11: mod_base = OTHER; note = 2'-fluoro-cytidine
  modified_base 12: mod_base = OTHER; note = 2'-O-methyl-cytidine
  modified_base 13: mod_base = OTHER; note = 2'-O-methyl-uridine
  modified_base 14: mod_base = OTHER; note = 2'-O-methyl-uridine
  modified_base 15: mod_base = OTHER; note = 2'-O-methyl-uridine
  modified_base 16: mod_base = OTHER; note = 2'-O-methyl-guanosine
  modified_base 17: mod_base = OTHER; note = 2'-O-methyl-uridine
  modified_base 18: mod_base = OTHER; note = 2'-O-methyl-adenosine with phosphorothioate linkage
  modified_base 19: mod_base = OTHER; note = 2'-O-methyl-cytidine with phosphorothioate linkage
  modified_base 20: mod_base = OTHER; note = 2'-O-methyl-adenosine conjugated to 3 iterations of (2R,3R,4R,5S)-5-(3-(5-(((2R,3R,4R,5R,6R)- 3-acetamido-4,5-dihydroxy-6-(hydroxymethyl)tetrahydro-2H-py ran-2-yl)oxy)pentanamido)propyl)-2-((hydroxyl)methyl)-4-met hoxytetrahydrofuran-3-oxyl
gtccctatttcctttgtaca

SEQ ID NO: 1055 - RNA, 20 nt, synthetic construct
  source 1..20: mol_type = other RNA
  modified_base 1: mod_base = OTHER; note = 2'-O-methyl-uridine with phosphorothioate linkage
  modified_base 2: mod_base = OTHER; note = 2'-O-methyl-cytidine with phosphorothioate linkage
  modified_base 3: mod_base = OTHER; note = 2'-O-methyl-cytidine
  modified_base 4: mod_base = OTHER; note = 2'-O-methyl-cytidine
  modified_base 5: mod_base = OTHER; note = 2'-O-methyl-uridine
  modified_base 6: mod_base = OTHER; note = 2'-fluoro-adenosine
  modified_base 7: mod_base = OTHER; note = 2'-O-methyl-uridine
  modified_base 8: mod_base = OTHER; note = 2'-fluoro-uridine
  modified_base 9: mod_base = OTHER; note = 2'-fluoro-uridine
  modified_base 10: mod_base = OTHER; note = 2'-fluoro-cytidine
  modified_base 11: mod_base = OTHER; note = 2'-fluoro-cytidine
  modified_base 12: mod_base = OTHER; note = 2'-O-methyl-uridine
  modified_base 13: mod_base = OTHER; note = 2'-O-methyl-uridine
  modified_base 14: mod_base = OTHER; note = 2'-O-methyl-uridine
  modified_base 15: mod_base = OTHER; note = 2'-O-methyl-guanosine
  modified_base 16: mod_base = OTHER; note = 2'-O-methyl-uridine
  modified_base 17: mod_base = OTHER; note = 2'-O-methyl-adenosine
  modified_base 18: mod_base = OTHER; note = 2'-O-methyl-cytidine with phosphorothioate linkage
  modified_base 19: mod_base = OTHER; note = 2'-O-methyl-adenosine with phosphorothioate linkage
  modified_base 20: mod_base = OTHER; note = 2'-O-methyl-adenosine conjugated to 3 iterations of (2R,3R,4R,5S)-5-(3-(5-(((2R,3R,4R,5R,6R)- 3-acetamido-4,5-dihydroxy-6-(hydroxymethyl)tetrahydro-2H-py ran-2-yl)oxy)pentanamido)propyl)-2-((hydroxyl)methyl)-4-met hoxytetrahydrofuran-3-oxyl
tccctatttcctttgtacaa

SEQ ID NO: 1056 - RNA, 20 nt, synthetic construct
  source 1..20: mol_type = other RNA
  modified_base 1: mod_base = OTHER; note = 2'-O-methyl-cytidine with phosphorothioate linkage
  modified_base 2: mod_base = OTHER; note = 2'-O-methyl-cytidine with phosphorothioate linkage
  modified_base 3: mod_base = OTHER; note = 2'-O-methyl-cytidine
  modified_base 4: mod_base = OTHER; note = 2'-O-methyl-uridine
  modified_base 5: mod_base = OTHER; note = 2'-O-methyl-adenosine
  modified_base 6: mod_base = OTHER; note = 2'-fluoro-uridine
  modified_base 7: mod_base = OTHER; note = 2'-O-methyl-uridine
  modified_base 8: mod_base = OTHER; note = 2'-fluoro-uridine
  modified_base 9: mod_base = OTHER; note = 2'-fluoro-cytidine
  modified_base 10: mod_base = OTHER; note = 2'-fluoro-cytidine
  modified_base 11: mod_base = OTHER; note = 2'-fluoro-uridine
  modified_base 12: mod_base = OTHER; note = 2'-O-methyl-uridine
  modified_base 13: mod_base = OTHER; note = 2'-O-methyl-uridine
  modified_base 14: mod_base = OTHER; note = 2'-O-methyl-guanosine
  modified_base 15: mod_base = OTHER; note = 2'-O-methyl-uridine
  modified_base 16: mod_base = OTHER; note = 2'-O-methyl-adenosine
  modified_base 17: mod_base = OTHER; note = 2'-O-methyl-cytidine
  modified_base 18: mod_base = OTHER; note = 2'-O-methyl-adenosine with phosphorothioate linkage
  modified_base 19: mod_base = OTHER; note = 2'-O-methyl-uridine with phosphorothioate linkage
  modified_base 20: mod_base = OTHER; note = 2'-O-methyl-adenosine conjugated to 3 iterations of (2R,3R,4R,5S)-5-(3-(5-(((2R,3R,4R,5R,6R)- 3-acetamido-4,5-dihydroxy-6-(hydroxymethyl)tetrahydro-2H-py ran-2-yl)oxy)pentanamido)propyl)-2-((hydroxyl)methyl)-4-met hoxytetrahydrofuran-3-oxyl
ccctatttcctttgtacata

SEQ ID NO: 1057 - RNA, 20 nt, synthetic construct
  source 1..20: mol_type = other RNA
  modified_base 1: mod_base = OTHER; note = 2'-O-methyl-uridine with phosphorothioate linkage
  modified_base 2: mod_base = OTHER; note = 2'-O-methyl-adenosine with phosphorothioate linkage
  modified_base 3: mod_base = OTHER; note = 2'-O-methyl-cytidine
  modified_base 4: mod_base = OTHER; note = 2'-O-methyl-uridine
  modified_base 5: mod_base = OTHER; note = 2'-O-methyl-adenosine
  modified_base 6: mod_base = OTHER; note = 2'-fluoro-uridine
  modified_base 7: mod_base = OTHER; note = 2'-O-methyl-cytidine
  modified_base 8: mod_base = OTHER; note = 2'-fluoro-cytidine
  modified_base 9: mod_base = OTHER; note = 2'-fluoro-cytidine
  modified_base 10: mod_base = OTHER; note = 2'-fluoro-adenosine
  modified_base 11: mod_base = OTHER; note = 2'-fluoro-uridine
  modified_base 12: mod_base = OTHER; note = 2'-O-methyl-adenosine
  modified_base 13: mod_base = OTHER; note = 2'-O-methyl-uridine
  modified_base 14: mod_base = OTHER; note = 2'-O-methyl-uridine
  modified_base 15: mod_base = OTHER; note = 2'-O-methyl-uridine
  modified_base 16: mod_base = OTHER; note = 2'-O-methyl-adenosine
  modified_base 17: mod_base = OTHER; note = 2'-O-methyl-adenosine
  modified_base 18: mod_base = OTHER; note = 2'-O-methyl-cytidine with phosphorothioate linkage
  modified_base 19: mod_base = OTHER; note = 2'-O-methyl-uridine with phosphorothioate linkage
  modified_base 20: mod_base = OTHER; note = 2'-O-methyl-adenosine conjugated to 3 iterations of (2R,3R,4R,5S)-5-(3-(5-(((2R,3R,4R,5R,6R)- 3-acetamido-4,5-dihydroxy-6-(hydroxymethyl)tetrahydro-2H-py ran-2-yl)oxy)pentanamido)propyl)-2-((hydroxyl)methyl)-4-met hoxytetrahydrofuran-3-oxyl
tactatcccatatttaacta

SEQ ID NO: 1058 - RNA, 20 nt, synthetic construct
  source 1..20: mol_type = other RNA
  modified_base 1: mod_base = OTHER; note = 2'-O-methyl-adenosine with phosphorothioate linkage
  modified_base 2: mod_base = OTHER; note = 2'-O-methyl-cytidine with phosphorothioate linkage
  modified_base 3: mod_base = OTHER; note = 2'-O-methyl-uridine
  modified_base 4: mod_base = OTHER; note = 2'-O-methyl-adenosine
  modified_base 5: mod_base = OTHER; note = 2'-O-methyl-uridine
  modified_base 6: mod_base = OTHER; note = 2'-fluoro-cytidine
  modified_base 7: mod_base = OTHER; note = 2'-O-methyl-cytidine
  modified_base 8: mod_base = OTHER; note = 2'-fluoro-cytidine
  modified_base 9: mod_base = OTHER; note = 2'-fluoro-adenosine
  modified_base 10: mod_base = OTHER; note = 2'-fluoro-uridine
  modified_base 11: mod_base = OTHER; note = 2'-fluoro-adenosine
  modified_base 12: mod_base = OTHER; note = 2'-O-methyl-uridine
  modified_base 13: mod_base = OTHER; note = 2'-O-methyl-uridine
  modified_base 14: mod_base = OTHER; note = 2'-O-methyl-uridine
  modified_base 15: mod_base = OTHER; note = 2'-O-methyl-adenosine
  modified_base 16: mod_base = OTHER; note = 2'-O-methyl-adenosine
  modified_base 17: mod_base = OTHER; note = 2'-O-methyl-cytidine
  modified_base 18: mod_base = OTHER; note = 2'-O-methyl-uridine with phosphorothioate linkage
  modified_base 19: mod_base = OTHER; note = 2'-O-methyl-guanosine with phosphorothioate linkage
  modified_base 20: mod_base = OTHER; note = 2'-O-methyl-adenosine conjugated to 3 iterations of (2R,3R,4R,5S)-5-(3-(5-(((2R,3R,4R,5R,6R)- 3-acetamido-4,5-dihydroxy-6-(hydroxymethyl)tetrahydro-2H-py ran-2-yl)oxy)pentanamido)propyl)-2-((hydroxyl)methyl)-4-met hoxytetrahydrofuran-3-oxyl
actatcccatatttaactga

SEQ ID NO: 1059 - RNA, 20 nt, synthetic construct
  source 1..20: mol_type = other RNA
  modified_base 1: mod_base = OTHER; note = 2'-O-methyl-uridine with phosphorothioate linkage
  modified_base 2: mod_base = OTHER; note = 2'-O-methyl-adenosine with phosphorothioate linkage
  modified_base 3: mod_base = OTHER; note = 2'-O-methyl-uridine
  modified_base 4: mod_base = OTHER; note = 2'-O-methyl-cytidine
  modified_base 5: mod_base = OTHER; note = 2'-O-methyl-cytidine
  modified_base 6: mod_base = OTHER; note = 2'-fluoro-cytidine
  modified_base 7: mod_base = OTHER; note = 2'-O-methyl-adenosine
  modified_base 8: mod_base = OTHER; note = 2'-fluoro-uridine
  modified_base 9: mod_base = OTHER; note = 2'-fluoro-adenosine
  modified_base 10: mod_base = OTHER; note = 2'-fluoro-uridine
  modified_base 11: mod_base = OTHER; note = 2'-fluoro-uridine
  modified_base 12: mod_base = OTHER; note = 2'-O-methyl-uridine
  modified_base 13: mod_base = OTHER; note = 2'-O-methyl-adenosine
  modified_base 14: mod_base = OTHER; note = 2'-O-methyl-adenosine
  modified_base 15: mod_base = OTHER; note = 2'-O-methyl-cytidine
  modified_base 16: mod_base = OTHER; note = 2'-O-methyl-uridine
  modified_base 17: mod_base = OTHER; note = 2'-O-methyl-guanosine
  modified_base 18: mod_base = OTHER; note = 2'-O-methyl-uridine with phosphorothioate linkage
  modified_base 19: mod_base = OTHER; note = 2'-O-methyl-uridine with phosphorothioate linkage
  modified_base 20: mod_base = OTHER; note = 2'-O-methyl-adenosine conjugated to 3 iterations of (2R,3R,4R,5S)-5-(3-(5-(((2R,3R,4R,5R,6R)- 3-acetamido-4,5-dihydroxy-6-(hydroxymethyl)tetrahydro-2H-py ran-2-yl)oxy)pentanamido)propyl)-2-((hydroxyl)methyl)-4-met hoxytetrahydrofuran-3-oxyl
tatcccatatttaactgtta

SEQ ID NO: 1060 - RNA, 20 nt, synthetic construct
  source 1..20: mol_type = other RNA
  modified_base 1: mod_base = OTHER; note = 2'-O-methyl-adenosine with phosphorothioate linkage
  modified_base 2: mod_base = OTHER; note = 2'-O-methyl-uridine with phosphorothioate linkage
  modified_base 3: mod_base = OTHER; note = 2'-O-methyl-cytidine
  modified_base 4: mod_base = OTHER; note = 2'-O-methyl-cytidine
  modified_base 5: mod_base = OTHER; note = 2'-O-methyl-cytidine
  modified_base 6: mod_base = OTHER; note = 2'-fluoro-adenosine
  modified_base 7: mod_base = OTHER; note = 2'-O-methyl-uridine
  modified_base 8: mod_base = OTHER; note = 2'-fluoro-adenosine
  modified_base 9: mod_base = OTHER; note = 2'-fluoro-uridine
  modified_base 10: mod_base = OTHER; note = 2'-fluoro-uridine
  modified_base 11: mod_base = OTHER; note = 2'-fluoro-uridine
  modified_base 12: mod_base = OTHER; note = 2'-O-methyl-adenosine
  modified_base 13: mod_base = OTHER; note = 2'-O-methyl-adenosine
  modified_base 14: mod_base = OTHER; note = 2'-O-methyl-cytidine
  modified_base 15: mod_base = OTHER; note = 2'-O-methyl-uridine
  modified_base 16: mod_base = OTHER; note = 2'-O-methyl-guanosine
  modified_base 17: mod_base = OTHER; note = 2'-O-methyl-uridine
  modified_base 18: mod_base = OTHER; note = 2'-O-methyl-uridine with phosphorothioate linkage
  modified_base 19: mod_base = OTHER; note = 2'-O-methyl-cytidine with phosphorothioate linkage
  modified_base 20: mod_base = OTHER; note = 2'-O-methyl-adenosine conjugated to 3 iterations of (2R,3R,4R,5S)-5-(3-(5-(((2R,3R,4R,5R,6R)- 3-acetamido-4,5-dihydroxy-6-(hydroxymethyl)tetrahydro-2H-py ran-2-yl)oxy)pentanamido)propyl)-2-((hydroxyl)methyl)-4-met hoxytetrahydrofuran-3-oxyl
atcccatatttaactgttca

SEQ ID NO: 1061 - RNA, 20 nt, synthetic construct
  source 1..20: mol_type = other RNA
  modified_base 1: mod_base = OTHER; note = 2'-O-methyl-adenosine with phosphorothioate linkage
  modified_base 2: mod_base = OTHER; note = 2'-O-methyl-guanosine with phosphorothioate linkage
  modified_base 3: mod_base = OTHER; note = 2'-O-methyl-adenosine
  modified_base 4: mod_base = OTHER; note = 2'-O-methyl-adenosine
  modified_base 5: mod_base = OTHER; note = 2'-O-methyl-adenosine
  modified_base 6: mod_base = OTHER; note = 2'-fluoro-guanosine
  modified_base 7: mod_base = OTHER; note = 2'-O-methyl-uridine
  modified_base 8: mod_base = OTHER; note = 2'-fluoro-adenosine
  modified_base 9: mod_base = OTHER; note = 2'-fluoro-guanosine
  modified_base 10: mod_base = OTHER; note = 2'-fluoro-cytidine
  modified_base 11: mod_base = OTHER; note = 2'-fluoro-uridine
  modified_base 12: mod_base = OTHER; note = 2'-O-methyl-uridine
  modified_base 13: mod_base = OTHER; note = 2'-O-methyl-uridine
  modified_base 14: mod_base = OTHER; note = 2'-O-methyl-adenosine
  modified_base 15: mod_base = OTHER; note = 2'-O-methyl-uridine
  modified_base 16: mod_base = OTHER; note = 2'-O-methyl-uridine
  modified_base 17: mod_base = OTHER; note = 2'-O-methyl-uridine
  modified_base 18: mod_base = OTHER; note = 2'-O-methyl-guanosine with phosphorothioate linkage
  modified_base 19: mod_base = OTHER; note = 2'-O-methyl-guanosine with phosphorothioate linkage
  modified_base 20: mod_base = OTHER; note = 2'-O-methyl-adenosine conjugated to 3 iterations of (2R,3R,4R,5S)-5-(3-(5-(((2R,3R,4R,5R,6R)- 3-acetamido-4,5-dihydroxy-6-(hydroxymethyl)tetrahydro-2H-py ran-2-yl)oxy)pentanamido)propyl)-2-((hydroxyl)methyl)-4-met hoxytetrahydrofuran-3-oxyl
agaaagtagctttatttgga

SEQ ID NO: 1062 - RNA, 20 nt, synthetic construct
  source 1..20: mol_type = other RNA
  modified_base 1: mod_base = OTHER; note = 2'-O-methyl-adenosine with phosphorothioate linkage
  modified_base 2: mod_base = OTHER; note = 2'-O-methyl-adenosine with phosphorothioate linkage
  modified_base 3: mod_base = OTHER; note = 2'-O-methyl-adenosine
  modified_base 4: mod_base = OTHER; note = 2'-O-methyl-guanosine
  modified_base 5: mod_base = OTHER; note = 2'-O-methyl-uridine
  modified_base 6: mod_base = OTHER; note = 2'-fluoro-adenosine
  modified_base 7: mod_base = OTHER; note = 2'-O-methyl-guanosine
  modified_base 8: mod_base = OTHER; note = 2'-fluoro-cytidine
  modified_base 9: mod_base = OTHER; note = 2'-fluoro-uridine
  modified_base 10: mod_base = OTHER; note = 2'-fluoro-uridine
  modified_base 11: mod_base = OTHER; note = 2'-fluoro-uridine
  modified_base 12: mod_base = OTHER; note = 2'-O-methyl-adenosine
  modified_base 13: mod_base = OTHER; note = 2'-O-methyl-uridine
  modified_base 14: mod_base = OTHER; note = 2'-O-methyl-uridine
  modified_base 15: mod_base = OTHER; note = 2'-O-methyl-uridine
  modified_base 16: mod_base = OTHER; note = 2'-O-methyl-guanosine
  modified_base 17: mod_base = OTHER; note = 2'-O-methyl-guanosine
  modified_base 18: mod_base = OTHER; note = 2'-O-methyl-adenosine with phosphorothioate linkage
  modified_base 19: mod_base = OTHER; note = 2'-O-methyl-uridine with phosphorothioate linkage
  modified_base 20: mod_base = OTHER; note = 2'-O-methyl-adenosine conjugated to 3 iterations of (2R,3R,4R,5S)-5-(3-(5-(((2R,3R,4R,5R,6R)- 3-acetamido-4,5-dihydroxy-6-(hydroxymethyl)tetrahydro-2H-py ran-2-yl)oxy)pentanamido)propyl)-2-((hydroxyl)methyl)-4-met hoxytetrahydrofuran-3-oxyl
aaagtagctttatttggata

SEQ ID NO: 1063 - RNA, 20 nt, synthetic construct
  source 1..20: mol_type = other RNA
  modified_base 1: mod_base = OTHER; note = 2'-O-methyl-adenosine with phosphorothioate linkage
  modified_base 2: mod_base = OTHER; note = 2'-O-methyl-adenosine with phosphorothioate linkage
  modified_base 3: mod_base = OTHER; note = 2'-O-methyl-guanosine
  modified_base 4: mod_base = OTHER; note = 2'-O-methyl-uridine
  modified_base 5: mod_base = OTHER; note = 2'-O-methyl-adenosine
  modified_base 6: mod_base = OTHER; note = 2'-fluoro-guanosine
  modified_base 7: mod_base = OTHER; note = 2'-O-methyl-cytidine
  modified_base 8: mod_base = OTHER; note = 2'-fluoro-uridine
  modified_base 9: mod_base = OTHER; note = 2'-fluoro-uridine
  modified_base 10: mod_base = OTHER; note = 2'-fluoro-uridine
  modified_base 11: mod_base = OTHER; note = 2'-fluoro-adenosine
  modified_base 12: mod_base = OTHER; note = 2'-O-methyl-uridine
  modified_base 13: mod_base = OTHER; note = 2'-O-methyl-uridine
  modified_base 14: mod_base = OTHER; note = 2'-O-methyl-uridine
  modified_base 15: mod_base = OTHER; note = 2'-O-methyl-guanosine
  modified_base 16: mod_base = OTHER; note = 2'-O-methyl-guanosine
  modified_base 17: mod_base = OTHER; note = 2'-O-methyl-adenosine
  modified_base 18: mod_base = OTHER; note = 2'-O-methyl-uridine with phosphorothioate linkage
  modified_base 19: mod_base = OTHER; note = 2'-O-methyl-adenosine with phosphorothioate linkage
  modified_base 20: mod_base = OTHER; note = 2'-O-methyl-adenosine conjugated to 3 iterations of (2R,3R,4R,5S)-5-(3-(5-(((2R,3R,4R,5R,6R)- 3-acetamido-4,5-dihydroxy-6-(hydroxymethyl)tetrahydro-2H-py ran-2-yl)oxy)pentanamido)propyl)-2-((hydroxyl)methyl)-4-met hoxytetrahydrofuran-3-oxyl
aagtagctttatttggataa

SEQ ID NO: 1064 - RNA, 20 nt, synthetic construct
  source 1..20: mol_type = other RNA
  modified_base 1: mod_base = OTHER; note = 2'-O-methyl-adenosine with phosphorothioate linkage
  modified_base 2: mod_base = OTHER; note = 2'-O-methyl-guanosine with phosphorothioate linkage
  modified_base 3: mod_base = OTHER; note = 2'-O-methyl-uridine
  modified_base 4: mod_base = OTHER; note = 2'-O-methyl-adenosine
  modified_base 5: mod_base = OTHER; note = 2'-O-methyl-guanosine
  modified_base 6: mod_base = OTHER; note = 2'-fluoro-cytidine
  modified_base 7: mod_base = OTHER; note = 2'-O-methyl-uridine
  modified_base 8: mod_base = OTHER; note = 2'-fluoro-uridine
  modified_base 9: mod_base = OTHER; note = 2'-fluoro-uridine
  modified_base 10: mod_base = OTHER; note = 2'-fluoro-adenosine
  modified_base 11: mod_base = OTHER; note = 2'-fluoro-uridine
  modified_base 12: mod_base = OTHER; note = 2'-O-methyl-uridine
  modified_base 13: mod_base = OTHER; note = 2'-O-methyl-uridine
  modified_base 14: mod_base = OTHER; note = 2'-O-methyl-guanosine
  modified_base 15: mod_base = OTHER; note = 2'-O-methyl-guanosine
  modified_base 16: mod_base = OTHER; note = 2'-O-methyl-adenosine
  modified_base 17: mod_base = OTHER; note = 2'-O-methyl-uridine
  modified_base 18: mod_base = OTHER; note = 2'-O-methyl-adenosine with phosphorothioate linkage
  modified_base 19: mod_base = OTHER; note = 2'-O-methyl-uridine with phosphorothioate linkage
  modified_base 20: mod_base = OTHER; note = 2'-O-methyl-adenosine conjugated to 3 iterations of (2R,3R,4R,5S)-5-(3-(5-(((2R,3R,4R,5R,6R)- 3-acetamido-4,5-dihydroxy-6-(hydroxymethyl)tetrahydro-2H-py ran-2-yl)oxy)pentanamido)propyl)-2-((hydroxyl)methyl)-4-met hoxytetrahydrofuran-3-oxyl
agtagctttatttggatata

SEQ ID NO: 1065 - RNA, 20 nt, synthetic construct
  source 1..20: mol_type = other RNA
  modified_base 1: mod_base = OTHER; note = 2'-O-methyl-uridine with phosphorothioate linkage
  modified_base 2: mod_base = OTHER; note = 2'-O-methyl-cytidine with phosphorothioate linkage
  modified_base 3: mod_base = OTHER; note = 2'-O-methyl-uridine
  modified_base 4: mod_base = OTHER; note = 2'-O-methyl-guanosine
  modified_base 5: mod_base = OTHER; note = 2'-O-methyl-adenosine
  modified_base 6: mod_base = OTHER; note = 2'-fluoro-adenosine
  modified_base 7: mod_base = OTHER; note = 2'-O-methyl-guanosine
  modified_base 8: mod_base = OTHER; note = 2'-fluoro-adenosine
  modified_base 9: mod_base = OTHER; note = 2'-fluoro-adenosine
  modified_base 10: mod_base = OTHER; note = 2'-fluoro-adenosine
  modified_base 11: mod_base = OTHER; note = 2'-fluoro-uridine
  modified_base 12: mod_base = OTHER; note = 2'-O-methyl-cytidine
  modified_base 13: mod_base = OTHER; note = 2'-O-methyl-cytidine
  modified_base 14: mod_base = OTHER; note = 2'-O-methyl-guanosine
  modified_base 15: mod_base = OTHER; note = 2'-O-methyl-uridine
  modified_base 16: mod_base = OTHER; note = 2'-O-methyl-adenosine
  modified_base 17: mod_base = OTHER; note = 2'-O-methyl-uridine
  modified_base 18: mod_base = OTHER; note = 2'-O-methyl-guanosine with phosphorothioate linkage
  modified_base 19: mod_base = OTHER; note = 2'-O-methyl-uridine with phosphorothioate linkage
  modified_base 20: mod_base = OTHER; note = 2'-O-methyl-adenosine conjugated to 3 iterations of (2R,3R,4R,5S)-5-(3-(5-(((2R,3R,4R,5R,6R)- 3-acetamido-4,5-dihydroxy-6-(hydroxymethyl)tetrahydro-2H-py ran-2-yl)oxy)pentanamido)propyl)-2-((hydroxyl)methyl)-4-met hoxytetrahydrofuran-3-oxyl
tctgaagaaatccgtatgta

SEQ ID NO: 1066 - RNA, 20 nt, synthetic construct
  source 1..20: mol_type = other RNA
  modified_base 1: mod_base = OTHER; note = 2'-O-methyl-uridine with phosphorothioate linkage
  modified_base 2: mod_base = OTHER; note = 2'-O-methyl-guanosine with phosphorothioate linkage
  modified_base 3: mod_base = OTHER; note = 2'-O-methyl-adenosine
  modified_base 4: mod_base = OTHER; note = 2'-O-methyl-adenosine
  modified_base 5: mod_base = OTHER; note = 2'-O-methyl-guanosine
  modified_base 6: mod_base = OTHER; note = 2'-fluoro-adenosine
  modified_base 7: mod_base = OTHER; note = 2'-O-methyl-adenosine
  modified_base 8: mod_base = OTHER; note = 2'-fluoro-adenosine
  modified_base 9: mod_base = OTHER; note = 2'-fluoro-uridine
  modified_base 10: mod_base = OTHER; note = 2'-fluoro-cytidine
  modified_base 11: mod_base = OTHER; note = 2'-fluoro-cytidine
  modified_base 12: mod_base = OTHER; note = 2'-O-methyl-guanosine
  modified_base 13: mod_base = OTHER; note = 2'-O-methyl-uridine
  modified_base 14: mod_base = OTHER; note = 2'-O-methyl-adenosine
  modified_base 15: mod_base = OTHER; note = 2'-O-methyl-uridine
  modified_base 16: mod_base = OTHER; note = 2'-O-methyl-guanosine
  modified_base 17: mod_base = OTHER; note = 2'-O-methyl-uridine
  modified_base 18: mod_base = OTHER; note = 2'-O-methyl-uridine with phosphorothioate linkage
  modified_base 19: mod_base = OTHER; note = 2'-O-methyl-adenosine with phosphorothioate linkage
  modified_base 20: mod_base = OTHER; note = 2'-O-methyl-adenosine conjugated to 3 iterations of (2R,3R,4R,5S)-5-(3-(5-(((2R,3R,4R,5R,6R)- 3-acetamido-4,5-dihydroxy-6-(hydroxymethyl)tetrahydro-2H-py ran-2-yl)oxy)pentanamido)propyl)-2-((hydroxyl)methyl)-4-met hoxytetrahydrofuran-3-oxyl
tgaagaaatccgtatgttaa

SEQ ID NO: 1067 - RNA, 20 nt, synthetic construct
  source 1..20: mol_type = other RNA
  modified_base 1: mod_base = OTHER; note = 2'-O-methyl-adenosine with phosphorothioate linkage
  modified_base 2: mod_base = OTHER; note = 2'-O-methyl-uridine with phosphorothioate linkage
  modified_base 3: mod_base = OTHER; note = 2'-O-methyl-adenosine
  modified_base 4: mod_base = OTHER; note = 2'-O-methyl-cytidine
  modified_base 5: mod_base = OTHER; note = 2'-O-methyl-uridine
  modified_base 6: mod_base = OTHER; note = 2'-fluoro-uridine
  modified_base 7: mod_base = OTHER; note = 2'-O-methyl-adenosine
  modified_base 8: mod_base = OTHER; note = 2'-fluoro-uridine
  modified_base 9: mod_base = OTHER; note = 2'-fluoro-guanosine
  modified_base 10: mod_base = OTHER; note = 2'-fluoro-cytidine
  modified_base 11: mod_base = OTHER; note = 2'-fluoro-uridine
  modified_base 12: mod_base = OTHER; note = 2'-O-methyl-guanosine
  modified_base 13: mod_base = OTHER; note = 2'-O-methyl-uridine
  modified_base 14: mod_base = OTHER; note = 2'-O-methyl-cytidine
  modified_base 15: mod_base = OTHER; note = 2'-O-methyl-adenosine
  modified_base 16: mod_base = OTHER; note = 2'-O-methyl-adenosine
  modified_base 17: mod_base = OTHER; note = 2'-O-methyl-adenosine
  modified_base 18: mod_base = OTHER; note = 2'-O-methyl-uridine with phosphorothioate linkage
  modified_base 19: mod_base = OTHER; note = 2'-O-methyl-guanosine with phosphorothioate linkage
  modified_base 20: mod_base = OTHER; note = 2'-O-methyl-adenosine conjugated to 3 iterations of (2R,3R,4R,5S)-5-(3-(5-(((2R,3R,4R,5R,6R)- 3-acetamido-4,5-dihydroxy-6-(hydroxymethyl)tetrahydro-2H-py ran-2-yl)oxy)pentanamido)propyl)-2-((hydroxyl)methyl)-4-met hoxytetrahydrofuran-3-oxyl
atacttatgctgtcaaatga

SEQ ID NO: 1068 - RNA, 20 nt, synthetic construct
  source 1..20: mol_type = other RNA
  modified_base 1: mod_base = OTHER; note = 2'-O-methyl-uridine with phosphorothioate linkage
  modified_base 2: mod_base = OTHER; note = 2'-O-methyl-adenosine with phosphorothioate linkage
  modified_base 3: mod_base = OTHER; note = 2'-O-methyl-cytidine
  modified_base 4: mod_base = OTHER; note = 2'-O-methyl-uridine
  modified_base 5: mod_base = OTHER; note = 2'-O-methyl-uridine
  modified_base 6: mod_base = OTHER; note = 2'-fluoro-adenosine
  modified_base 7: mod_base = OTHER; note = 2'-O-methyl-uridine
  modified_base 8: mod_base = OTHER; note = 2'-fluoro-guanosine
  modified_base 9: mod_base = OTHER; note = 2'-fluoro-cytidine
  modified_base 10: mod_base = OTHER; note = 2'-fluoro-uridine
  modified_base 11: mod_base = OTHER; note = 2'-fluoro-guanosine
  modified_base 12: mod_base = OTHER; note = 2'-O-methyl-uridine
  modified_base 13: mod_base = OTHER; note = 2'-O-methyl-cytidine
  modified_base 14: mod_base = OTHER; note = 2'-O-methyl-adenosine
  modified_base 15: mod_base = OTHER; note = 2'-O-methyl-adenosine
  modified_base 16: mod_base = OTHER; note = 2'-O-methyl-adenosine
  modified_base 17: mod_base = OTHER; note = 2'-O-methyl-uridine
  modified_base 18: mod_base = OTHER; note = 2'-O-methyl-guanosine with phosphorothioate linkage
  modified_base 19: mod_base = OTHER; note = 2'-O-methyl-uridine with phosphorothioate linkage
  modified_base 20: mod_base = OTHER; note = 2'-O-methyl-adenosine conjugated to 3 iterations of (2R,3R,4R,5S)-5-(3-(5-(((2R,3R,4R,5R,6R)- 3-acetamido-4,5-dihydroxy-6-(hydroxymethyl)tetrahydro-2H-py ran-2-yl)oxy)pentanamido)propyl)-2-((hydroxyl)methyl)-4-met hoxytetrahydrofuran-3-oxyl
tacttatgctgtcaaatgta

SEQ ID NO: 1069 - RNA, 20 nt, synthetic construct
  source 1..20: mol_type = other RNA
  modified_base 1: mod_base = OTHER; note = 2'-O-methyl-adenosine with phosphorothioate linkage
  modified_base 2: mod_base = OTHER; note = 2'-O-methyl-cytidine with phosphorothioate linkage
  modified_base 3: mod_base = OTHER; note = 2'-O-methyl-uridine
  modified_base 4: mod_base = OTHER; note = 2'-O-methyl-uridine
  modified_base 5: mod_base = OTHER; note = 2'-O-methyl-adenosine
  modified_base 6: mod_base = OTHER; note = 2'-fluoro-uridine
  modified_base 7: mod_base = OTHER; note = 2'-O-methyl-guanosine
  modified_base 8: mod_base = OTHER; note = 2'-fluoro-cytidine
  modified_base 9: mod_base = OTHER; note = 2'-fluoro-uridine
  modified_base 10: mod_base = OTHER; note = 2'-fluoro-guanosine
  modified_base 11: mod_base = OTHER; note = 2'-fluoro-uridine
  modified_base 12: mod_base = OTHER; note = 2'-O-methyl-cytidine
  modified_base 13: mod_base = OTHER; note = 2'-O-methyl-adenosine
  modified_base 14: mod_base = OTHER; note = 2'-O-methyl-adenosine
  modified_base 15: mod_base = OTHER; note = 2'-O-methyl-adenosine
  modified_base 16: mod_base = OTHER; note = 2'-O-methyl-uridine
  modified_base 17: mod_base = OTHER; note = 2'-O-methyl-guanosine
  modified_base 18: mod_base = OTHER; note = 2'-O-methyl-uridine with phosphorothioate linkage
  modified_base 19: mod_base = OTHER; note = 2'-O-methyl-uridine with phosphorothioate linkage
  modified_base 20: mod_base = OTHER; note = 2'-O-methyl-adenosine conjugated to 3 iterations of (2R,3R,4R,5S)-5-(3-(5-(((2R,3R,4R,5R,6R)- 3-acetamido-4,5-dihydroxy-6-(hydroxymethyl)tetrahydro-2H-py ran-2-yl)oxy)pentanamido)propyl)-2-((hydroxyl)methyl)-4-met hoxytetrahydrofuran-3-oxyl
acttatgctgtcaaatgtta

SEQ ID NO: 1070 - RNA, 20 nt, synthetic construct
  source 1..20: mol_type = other RNA
  modified_base 1: mod_base = OTHER; note = 2'-O-methyl-uridine with phosphorothioate linkage
  modified_base 2: mod_base = OTHER; note = 2'-O-methyl-uridine with phosphorothioate linkage
  modified_base 3: mod_base = OTHER; note = 2'-O-methyl-adenosine
  modified_base 4: mod_base = OTHER; note = 2'-O-methyl-uridine
  modified_base 5: mod_base = OTHER; note = 2'-O-methyl-guanosine
  modified_base 6: mod_base = OTHER; note = 2'-fluoro-cytidine
  modified_base 7: mod_base = OTHER; note = 2'-O-methyl-uridine
  modified_base 8: mod_base = OTHER; note = 2'-fluoro-guanosine
  modified_base 9: mod_base = OTHER; note = 2'-fluoro-uridine
  modified_base 10: mod_base = OTHER; note = 2'-fluoro-cytidine
  modified_base 11: mod_base = OTHER; note = 2'-fluoro-adenosine
  modified_base 12: mod_base = OTHER; note = 2'-O-methyl-adenosine
  modified_base 13: mod_base = OTHER; note = 2'-O-methyl-adenosine
  modified_base 14: mod_base = OTHER; note = 2'-O-methyl-uridine
  modified_base 15: mod_base = OTHER; note = 2'-O-methyl-guanosine
  modified_base 16: mod_base = OTHER; note = 2'-O-methyl-uridine
  modified_base 17: mod_base = OTHER; note = 2'-O-methyl-uridine
  modified_base 18: mod_base = OTHER; note = 2'-O-methyl-adenosine with phosphorothioate linkage
  modified_base 19: mod_base = OTHER; note = 2'-O-methyl-uridine with phosphorothioate linkage
  modified_base 20: mod_base = OTHER; note = 2'-O-methyl-adenosine conjugated to 3 iterations of (2R,3R,4R,5S)-5-(3-(5-(((2R,3R,4R,5R,6R)- 3-acetamido-4,5-dihydroxy-6-(hydroxymethyl)tetrahydro-2H-py ran-2-yl)oxy)pentanamido)propyl)-2-((hydroxyl)methyl)-4-met hoxytetrahydrofuran-3-oxyl
ttatgctgtcaaatgttata

SEQ ID NO: 1071 - RNA, 20 nt, synthetic construct
  source 1..20: mol_type = other RNA
  modified_base 1: mod_base = OTHER; note = 2'-O-methyl-uridine with phosphorothioate linkage
  modified_base 2: mod_base = OTHER; note = 2'-O-methyl-adenosine with phosphorothioate linkage
  modified_base 3: mod_base = OTHER; note = 2'-O-methyl-uridine
  modified_base 4: mod_base = OTHER; note = 2'-O-methyl-guanosine
  modified_base 5: mod_base = OTHER; note = 2'-O-methyl-cytidine
  modified_base 6: mod_base = OTHER; note = 2'-fluoro-uridine
  modified_base 7: mod_base = OTHER; note = 2'-O-methyl-guanosine
  modified_base 8: mod_base = OTHER; note = 2'-fluoro-uridine
  modified_base 9: mod_base = OTHER; note = 2'-fluoro-cytidine
  modified_base 10: mod_base = OTHER; note = 2'-fluoro-adenosine
  modified_base 11: mod_base = OTHER; note = 2'-fluoro-adenosine
  modified_base 12: mod_base = OTHER; note = 2'-O-methyl-adenosine
  modified_base 13: mod_base = OTHER; note = 2'-O-methyl-uridine
  modified_base 14: mod_base = OTHER; note = 2'-O-methyl-guanosine
  modified_base 15: mod_base = OTHER; note = 2'-O-methyl-uridine
  modified_base 16: mod_base = OTHER; note = 2'-O-methyl-uridine
  modified_base 17: mod_base = OTHER; note = 2'-O-methyl-adenosine
  modified_base 18: mod_base = OTHER; note = 2'-O-methyl-uridine with phosphorothioate linkage
  modified_base 19: mod_base = OTHER; note = 2'-O-methyl-adenosine with phosphorothioate linkage
  modified_base 20: mod_base = OTHER; note = 2'-O-methyl-adenosine conjugated to 3 iterations of (2R,3R,4R,5S)-5-(3-(5-(((2R,3R,4R,5R,6R)- 3-acetamido-4,5-dihydroxy-6-(hydroxymethyl)tetrahydro-2H-py ran-2-yl)oxy)pentanamido)propyl)-2-((hydroxyl)methyl)-4-met hoxytetrahydrofuran-3-oxyl
tatgctgtcaaatgttataa

SEQ ID NO: 1072 - RNA, 20 nt, synthetic construct
  source 1..20: mol_type = other RNA
  modified_base 1: mod_base = OTHER; note = 2'-O-methyl-uridine with phosphorothioate linkage
  modified_base 2: mod_base = OTHER; note = 2'-O-methyl-cytidine with phosphorothioate linkage
  modified_base 3: mod_base = OTHER; note = 2'-O-methyl-uridine
  modified_base 4: mod_base = OTHER; note = 2'-O-methyl-guanosine
  modified_base 5: mod_base = OTHER; note = 2'-O-methyl-uridine
  modified_base 6: mod_base = OTHER; note = 2'-fluoro-uridine
  modified_base 7: mod_base = OTHER; note = 2'-O-methyl-guanosine
  modified_base 8: mod_base = OTHER; note = 2'-fluoro-uridine
  modified_base 9: mod_base = OTHER; note = 2'-fluoro-adenosine
  modified_base 10: mod_base = OTHER; note = 2'-fluoro-uridine
  modified_base 11: mod_base = OTHER; note = 2'-fluoro-guanosine
  modified_base 12: mod_base = OTHER; note = 2'-O-methyl-cytidine
  modified_base 13: mod_base = OTHER; note = 2'-O-methyl-uridine
  modified_base 14: mod_base = OTHER; note = 2'-O-methyl-uridine
  modified_base 15: mod_base = OTHER; note = 2'-O-methyl-uridine
  modified_base 16: mod_base = OTHER; note = 2'-O-methyl-cytidine
  modified_base 17: mod_base = OTHER; note = 2'-O-methyl-uridine
  modified_base 18: mod_base = OTHER; note = 2'-O-methyl-uridine with phosphorothioate linkage
  modified_base 19: mod_base = OTHER; note = 2'-O-methyl-cytidine with phosphorothioate linkage
  modified_base 20: mod_base = OTHER; note = 2'-O-methyl-adenosine conjugated to 3 iterations of (2R,3R,4R,5S)-5-(3-(5-(((2R,3R,4R,5R,6R)- 3-acetamido-4,5-dihydroxy-6-(hydroxymethyl)tetrahydro-2H-py ran-2-yl)oxy)pentanamido)propyl)-2-((hydroxyl)methyl)-4-met hoxytetrahydrofuran-3-oxyl
tctgttgtatgctttcttca

SEQ ID NO: 1073 - RNA, 20 nt, synthetic construct
  source 1..20: mol_type = other RNA
  modified_base 1: mod_base = OTHER; note = 2'-O-methyl-uridine with phosphorothioate linkage
  modified_base 2: mod_base = OTHER; note = 2'-O-methyl-guanosine with phosphorothioate linkage
  modified_base 3: mod_base = OTHER; note = 2'-O-methyl-uridine
  modified_base 4: mod_base = OTHER; note = 2'-O-methyl-uridine
  modified_base 5: mod_base = OTHER; note = 2'-O-methyl-guanosine
  modified_base 6: mod_base = OTHER; note = 2'-fluoro-uridine
  modified_base 7: mod_base = OTHER; note = 2'-O-methyl-adenosine
  modified_base 8: mod_base = OTHER; note = 2'-fluoro-uridine
  modified_base 9: mod_base = OTHER; note = 2'-fluoro-guanosine
  modified_base 10: mod_base = OTHER; note = 2'-fluoro-cytidine
  modified_base 11: mod_base = OTHER; note = 2'-fluoro-uridine
  modified_base 12: mod_base = OTHER; note = 2'-O-methyl-uridine
  modified_base 13: mod_base = OTHER; note = 2'-O-methyl-uridine
  modified_base 14: mod_base = OTHER; note = 2'-O-methyl-cytidine
  modified_base 15: mod_base = OTHER; note = 2'-O-methyl-uridine
  modified_base 16: mod_base = OTHER; note = 2'-O-methyl-uridine
  modified_base 17: mod_base = OTHER; note = 2'-O-methyl-cytidine
  modified_base 18: mod_base = OTHER; note = 2'-O-methyl-uridine with phosphorothioate linkage
  modified_base 19: mod_base = OTHER; note = 2'-O-methyl-adenosine with phosphorothioate linkage
  modified_base 20: mod_base = OTHER; note = 2'-O-methyl-adenosine conjugated to 3 iterations of (2R,3R,4R,5S)-5-(3-(5-(((2R,3R,4R,5R,6R)- 3-acetamido-4,5-dihydroxy-6-(hydroxymethyl)tetrahydro-2H-py ran-2-yl)oxy)pentanamido)propyl)-2-((hydroxyl)methyl)-4-met hoxytetrahydrofuran-3-oxyl
tgttgtatgctttcttctaa

SEQ ID NO: 1074 - RNA, 22 nt, synthetic construct
  source 1..22: mol_type = other RNA
  modified_base 1: mod_base = OTHER; note 3-(2,4-dioxo-3,4-dihydropyrimidin-1(2H)-yl)-2-methoxy-5-(2- phosphonoethyl)cyclopentan-1-oxyl with phosphorothioate linkage
  modified_base 2: mod_base = OTHER; note = 2'-fluoro-uridine with phosphorothioate linkage
  modified_base 3: mod_base = OTHER; note = 2'-fluoro-uridine
  modified_base 4: mod_base = OTHER; note = 2'-O-methyl-guanosine
  modified_base 5: mod_base = OTHER; note = 2'-fluoro-adenosine
  modified_base 6: mod_base = OTHER; note = 2'-O-methyl-adenosine
  modified_base 7: mod_base = OTHER; note = 2'-fluoro-guanosine
  modified_base 8: mod_base = OTHER; note = 2'-O-methyl-adenosine
  modified_base 9: mod_base = OTHER; note = 2'-O-methyl-adenosine
  modified_base 10: mod_base = OTHER; note = 2'-fluoro-uridine
  modified_base 11: mod_base = OTHER; note = 2'-O-methyl-cytidine
  modified_base 12: mod_base = OTHER; note = 2'-O-methyl-adenosine
  modified_base 13: mod_base = OTHER; note = 2'-O-methyl-cytidine
  modified_base 14: mod_base = OTHER; note = 2'-fluoro-adenosine
  modified_base 15: mod_base = OTHER; note = 2'-O-methyl-cytidine
  modified_base 16: mod_base = OTHER; note = 2'-fluoro-adenosine
  modified_base 17: mod_base = OTHER; note = 2'-O-methyl-adenosine
  modified_base 18: mod_base = OTHER; note = 2'-O-methyl-adenosine
  modified_base 19: mod_base = OTHER; note = 2'-O-methyl-adenosine
  modified_base 20: mod_base = OTHER; note = 2'-O-methyl-guanosine with phosphorothioate linkage
  modified_base 21: mod_base = OTHER; note = 2'-O-methyl-adenosine with phosphorothioate linkage
  modified_base 22: mod_base = OTHER; note = 2'-O-methyl-cytidine
tttgaagaatcacacaaaagac

SEQ ID NO: 1075 - RNA, 22 nt, synthetic construct
  source 1..22: mol_type = other RNA
  modified_base 1: mod_base = OTHER; note 3-(2,4-dioxo-3,4-dihydropyrimidin-1(2H)-yl)-2-methoxy-5-(2- phosphonoethyl)cyclopentan-1-oxyl with phosphorothioate linkage
  modified_base 2: mod_base = OTHER; note = 2'-fluoro-adenosine with phosphorothioate linkage
  modified_base 3: mod_base = OTHER; note = 2'-fluoro-uridine
  modified_base 4: mod_base = OTHER; note = 2'-O-methyl-cytidine
  modified_base 5: mod_base = OTHER; note = 2'-fluoro-adenosine
  modified_base 6: mod_base = OTHER; note = 2'-O-methyl-uridine
  modified_base 7: mod_base = OTHER; note = 2'-fluoro-uridine
  modified_base 8: mod_base = OTHER; note = 2'-O-methyl-adenosine
  modified_base 9: mod_base = OTHER; note = 2'-O-methyl-guanosine
  modified_base 10: mod_base = OTHER; note = 2'-fluoro-guanosine
  modified_base 11: mod_base = OTHER; note = 2'-O-methyl-cytidine
  modified_base 12: mod_base = OTHER; note = 2'-O-methyl-uridine
  modified_base 13: mod_base = OTHER; note = 2'-O-methyl-uridine
  modified_base 14: mod_base = OTHER; note = 2'-fluoro-uridine
  modified_base 15: mod_base = OTHER; note = 2'-O-methyl-guanosine
  modified_base 16: mod_base = OTHER; note = 2'-fluoro-cytidine
  modified_base 17: mod_base = OTHER; note = 2'-O-methyl-adenosine
  modified_base 18: mod_base = OTHER; note = 2'-O-methyl-guanosine
  modified_base 19: mod_base = OTHER; note = 2'-O-methyl-uridine
  modified_base 20: mod_base = OTHER; note = 2'-O-methyl-cytidine with phosphorothioate linkage
  modified_base 21: mod_base = OTHER; note = 2'-O-methyl-uridine with phosphorothioate linkage
  modified_base 22: mod_base = OTHER; note = 2'-O-methyl-uridine
tatcattaggctttgcagtctt

SEQ ID NO: 1076 - RNA, 22 nt, synthetic construct
  source 1..22: mol_type = other RNA
  modified_base 1: mod_base = OTHER; note 3-(2,4-dioxo-3,4-dihydropyrimidin-1(2H)-yl)-2-methoxy-5-(2- phosphonoethyl)cyclopentan-1-oxyl with phosphorothioate linkage
  modified_base 2: mod_base = OTHER; note = 2'-fluoro-uridine with phosphorothioate linkage
  modified_base 3: mod_base = OTHER; note = 2'-fluoro-adenosine
  modified_base 4: mod_base = OTHER; note = 2'-O-methyl-uridine
  modified_base 5: mod_base = OTHER; note = 2'-fluoro-uridine
  modified_base 6: mod_base = OTHER; note = 2'-O-methyl-cytidine
  modified_base 7: mod_base = OTHER; note = 2'-fluoro-adenosine
  modified_base 8: mod_base = OTHER; note = 2'-O-methyl-guanosine
  modified_base 9: mod_base = OTHER; note = 2'-O-methyl-adenosine
  modified_base 10: mod_base = OTHER; note = 2'-fluoro-uridine
  modified_base 11: mod_base = OTHER; note = 2'-O-methyl-adenosine
  modified_base 12: mod_base = OTHER; note = 2'-O-methyl-cytidine
  modified_base 13: mod_base = OTHER; note = 2'-O-methyl-cytidine
  modified_base 14: mod_base = OTHER; note = 2'-fluoro-adenosine
  modified_base 15: mod_base = OTHER; note = 2'-O-methyl-guanosine
  modified_base 16: mod_base = OTHER; note = 2'-fluoro-cytidine
  modified_base 17: mod_base = OTHER; note = 2'-O-methyl-cytidine
  modified_base 18: mod_base = OTHER; note = 2'-O-methyl-adenosine
  modified_base 19: mod_base = OTHER; note = 2'-O-methyl-adenosine
  modified_base 20: mod_base = OTHER; note = 2'-O-methyl-adenosine with phosphorothioate linkage
  modified_base 21: mod_base = OTHER; note = 2'-O-methyl-guanosine with phosphorothioate linkage
  modified_base 22: mod_base = OTHER; note = 2'-O-methyl-uridine
ttattcagataccagccaaagt

SEQ ID NO: 1077 - RNA, 22 nt, synthetic construct
  source 1..22: mol_type = other RNA
  modified_base 1: mod_base = OTHER; note 3-(2,4-dioxo-3,4-dihydropyrimidin-1(2H)-yl)-2-methoxy-5-(2- phosphonoethyl)cyclopentan-1-oxyl with phosphorothioate linkage
  modified_base 2: mod_base = OTHER; note = 2'-fluoro-uridine with phosphorothioate linkage
  modified_base 3: mod_base = OTHER; note = 2'-fluoro-cytidine
  modified_base 4: mod_base = OTHER; note = 2'-O-methyl-guanosine
  modified_base 5: mod_base = OTHER; note = 2'-fluoro-guanosine
  modified_base 6: mod_base = OTHER; note = 2'-O-methyl-uridine
  modified_base 7: mod_base = OTHER; note = 2'-fluoro-uridine
  modified_base 8: mod_base = OTHER; note = 2'-O-methyl-uridine
  modified_base 9: mod_base = OTHER; note = 2'-O-methyl-uridine
  modified_base 10: mod_base = OTHER; note = 2'-fluoro-guanosine
  modified_base 11: mod_base = OTHER; note = 2'-O-methyl-guanosine
  modified_base 12: mod_base = OTHER; note = 2'-O-methyl-uridine
  modified_base 13: mod_base = OTHER; note = 2'-O-methyl-adenosine
  modified_base 14: mod_base = OTHER; note = 2'-fluoro-adenosine
  modified_base 15: mod_base = OTHER; note = 2'-O-methyl-cytidine
  modified_base 16: mod_base = OTHER; note = 2'-fluoro-adenosine
  modified_base 17: mod_base = OTHER; note = 2'-O-methyl-uridine
  modified_base 18: mod_base = OTHER; note = 2'-O-methyl-uridine
  modified_base 19: mod_base = OTHER; note = 2'-O-methyl-guanosine
  modified_base 20: mod_base = OTHER; note = 2'-O-methyl-uridine with phosphorothioate linkage
  modified_base 21: mod_base = OTHER; note = 2'-O-methyl-uridine with phosphorothioate linkage
  modified_base 22: mod_base = OTHER; note = 2'-O-methyl-guanosine
ttcggttttggtaacattgttg

SEQ ID NO: 1078 - RNA, 22 nt, synthetic construct
  source 1..22: mol_type = other RNA
  modified_base 1: mod_base = OTHER; note 3-(2,4-dioxo-3,4-dihydropyrimidin-1(2H)-yl)-2-methoxy-5-(2- phosphonoethyl)cyclopentan-1-oxyl with phosphorothioate linkage
  modified_base 2: mod_base = OTHER; note = 2'-fluoro-uridine with phosphorothioate linkage
  modified_base 3: mod_base = OTHER; note = 2'-fluoro-uridine
  modified_base 4: mod_base = OTHER; note = 2'-O-methyl-guanosine
  modified_base 5: mod_base = OTHER; note = 2'-fluoro-cytidine
  modified_base 6: mod_base = OTHER; note = 2'-O-methyl-adenosine
  modified_base 7: mod_base = OTHER; note = 2'-fluoro-adenosine
  modified_base 8: mod_base = OTHER; note = 2'-O-methyl-adenosine
  modified_base 9: mod_base = OTHER; note = 2'-O-methyl-adenosine
  modified_base 10: mod_base = OTHER; note = 2'-fluoro-adenosine
  modified_base 11: mod_base = OTHER; note = 2'-O-methyl-uridine
  modified_base 12: mod_base = OTHER; note = 2'-O-methyl-cytidine
  modified_base 13: mod_base = OTHER; note = 2'-O-methyl-uridine
  modified_base 14: mod_base = OTHER; note = 2'-fluoro-guanosine
  modified_base 15: mod_base = OTHER; note = 2'-O-methyl-uridine
  modified_base 16: mod_base = OTHER; note = 2'-fluoro-guanosine
  modified_base 17: mod_base = OTHER; note = 2'-O-methyl-adenosine
  modified_base 18: mod_base = OTHER; note = 2'-O-methyl-adenosine
  modified_base 19: mod_base = OTHER; note = 2'-O-methyl-guanosine
  modified_base 20: mod_base = OTHER; note = 2'-O-methyl-cytidine with phosphorothioate linkage
  modified_base 21: mod_base = OTHER; note = 2'-O-methyl-adenosine with phosphorothioate linkage
  modified_base 22: mod_base = OTHER; note = 2'-O-methyl-guanosine
tttgcaaaaatctgtgaagcag

SEQ ID NO: 1079 - RNA, 20 nt, synthetic construct
  source 1..20: mol_type = other RNA
  modified_base 1: mod_base = OTHER; note = 2'-O-methyl-cytidine with phosphorothioate linkage
  modified_base 2: mod_base = OTHER; note = 2'-O-methyl-uridine with phosphorothioate linkage
  modified_base 3: mod_base = OTHER; note = 2'-O-methyl-uridine
  modified_base 4: mod_base = OTHER; note = 2'-O-methyl-uridine
  modified_base 5: mod_base = OTHER; note = 2'-O-methyl-uridine
  modified_base 6: mod_base = OTHER; note = 2'-fluoro-guanosine
  modified_base 7: mod_base = OTHER; note = 2'-O-methyl-uridine
  modified_base 8: mod_base = OTHER; note = 2'-fluoro-guanosine
  modified_base 9: mod_base = OTHER; note = 2'-fluoro-uridine
  modified_base 10: mod_base = OTHER; note = 2'-fluoro-guanosine
  modified_base 11: mod_base = OTHER; note = 2'-fluoro-adenosine
  modified_base 12: mod_base = OTHER; note = 2'-O-methyl-uridine
  modified_base 13: mod_base = OTHER; note = 2'-O-methyl-uridine
  modified_base 14: mod_base = OTHER; note = 2'-O-methyl-cytidine
  modified_base 15: mod_base = OTHER; note = 2'-O-methyl-uridine
  modified_base 16: mod_base = OTHER; note = 2'-O-methyl-uridine
  modified_base 17: mod_base = OTHER; note = 2'-O-methyl-cytidine
  modified_base 18: mod_base = OTHER; note = 2'-O-methyl-adenosine with phosphorothioate linkage
  modified_base 19: mod_base = OTHER; note = 2'-O-methyl-adenosine with phosphorothioate linkage
  modified_base 20: mod_base = OTHER; note = 2'-O-methyl-adenosine attached to (S)-12-(6-carboxyhexyl)-14-docosanamido-1-((5aS,6R,6aR)-6-( (((3-((2S,3R,4R,5R)-4-hydroxy-3-methoxy-5-(oxylmethyl)tetra hydrofuran-2-yl)propyl)carbamoyl)oxy)methyl)-5,5a,6,6a,7,8- hexahydrocyclopropa[5,6]cycloocta[1,2-d][1,2,3]triazol-1(4H )-yl)-13-oxo-3,6,9-trioxa-12-azapentadecan-15-yl (2-(trimethylammonio)ethyl) phosphate via a phosphorothioate linkage
cttttgtgtgattcttcaaa

SEQ ID NO: 1080 - RNA, 20 nt, synthetic construct
  source 1..20: mol_type = other RNA
  modified_base 1: mod_base = OTHER; note = 2'-O-methyl-guanosine with phosphorothioate linkage
  modified_base 2: mod_base = OTHER; note = 2'-O-methyl-adenosine with phosphorothioate linkage
  modified_base 3: mod_base = OTHER; note = 2'-O-methyl-cytidine
  modified_base 4: mod_base = OTHER; note = 2'-O-methyl-uridine
  modified_base 5: mod_base = OTHER; note = 2'-O-methyl-guanosine
  modified_base 6: mod_base = OTHER; note = 2'-fluoro-cytidine
  modified_base 7: mod_base = OTHER; note = 2'-O-methyl-adenosine
  modified_base 8: mod_base = OTHER; note = 2'-fluoro-adenosine
  modified_base 9: mod_base = OTHER; note = 2'-fluoro-adenosine
  modified_base 10: mod_base = OTHER; note = 2'-fluoro-guanosine
  modified_base 11: mod_base = OTHER; note = 2'-fluoro-cytidine
  modified_base 12: mod_base = OTHER; note = 2'-O-methyl-cytidine
  modified_base 13: mod_base = OTHER; note = 2'-O-methyl-uridine
  modified_base 14: mod_base = OTHER; note = 2'-O-methyl-adenosine
  modified_base 15: mod_base = OTHER; note = 2'-O-methyl-adenosine
  modified_base 16: mod_base = OTHER; note = 2'-O-methyl-uridine
  modified_base 17: mod_base = OTHER; note = 2'-O-methyl-guanosine
  modified_base 18: mod_base = OTHER; note = 2'-O-methyl-adenosine with phosphorothioate linkage
  modified_base 19: mod_base = OTHER; note = 2'-O-methyl-uridine with phosphorothioate linkage
  modified_base 20: mod_base = OTHER; note = 2'-O-methyl-adenosine attached to (S)-12-(6-carboxyhexyl)-14-docosanamido-1-((5aS,6R,6aR)-6-( (((3-((2S,3R,4R,5R)-4-hydroxy-3-methoxy-5-(oxylmethyl)tetra hydrofuran-2-yl)propyl)carbamoyl)oxy)methyl)-5,5a,6,6a,7,8- hexahydrocyclopropa[5,6]cycloocta[1,2-d][1,2,3]triazol-1(4H )-yl)-13-oxo-3,6,9-trioxa-12-azapentadecan-15-yl (2-(trimethylammonio)ethyl) phosphate via a phosphorothioate linkage
gactgcaaagcctaatgata

SEQ ID NO: 1081 - RNA, 20 nt, synthetic construct
  source 1..20: mol_type = other RNA
  modified_base 1: mod_base = OTHER; note = 2'-O-methyl-uridine with phosphorothioate linkage
  modified_base 2: mod_base = OTHER; note = 2'-O-methyl-uridine with phosphorothioate linkage
  modified_base 3: mod_base = OTHER; note = 2'-O-methyl-uridine
  modified_base 4: mod_base = OTHER; note = 2'-O-methyl-guanosine
  modified_base 5: mod_base = OTHER; note = 2'-O-methyl-guanosine
  modified_base 6: mod_base = OTHER; note = 2'-fluoro-cytidine
  modified_base 7: mod_base = OTHER; note = 2'-O-methyl-uridine
  modified_base 8: mod_base = OTHER; note = 2'-fluoro-guanosine
  modified_base 9: mod_base = OTHER; note = 2'-fluoro-guanosine
  modified_base 10: mod_base = OTHER; note = 2'-fluoro-uridine
  modified_base 11: mod_base = OTHER; note = 2'-fluoro-adenosine
  modified_base 12: mod_base = OTHER; note = 2'-O-methyl-uridine
  modified_base 13: mod_base = OTHER; note = 2'-O-methyl-cytidine
  modified_base 14: mod_base = OTHER; note = 2'-O-methyl-uridine
  modified_base 15: mod_base = OTHER; note = 2'-O-methyl-guanosine
  modified_base 16: mod_base = OTHER; note = 2'-O-methyl-adenosine
  modified_base 17: mod_base = OTHER; note = 2'-O-methyl-adenosine
  modified_base 18: mod_base = OTHER; note = 2'-O-methyl-uridine with phosphorothioate linkage
  modified_base 19: mod_base = OTHER; note = 2'-O-methyl-adenosine with phosphorothioate linkage
  modified_base 20: mod_base = OTHER; note = 2'-O-methyl-adenosine attached to (S)-12-(6-carboxyhexyl)-14-docosanamido-1-((5aS,6R,6aR)-6-( (((3-((2S,3R,4R,5R)-4-hydroxy-3-methoxy-5-(oxylmethyl)tetra hydrofuran-2-yl)propyl)carbamoyl)oxy)methyl)-5,5a,6,6a,7,8- hexahydrocyclopropa[5,6]cycloocta[1,2-d][1,2,3]triazol-1(4H )-yl)-13-oxo-3,6,9-trioxa-12-azapentadecan-15-yl (2-(trimethylammonio)ethyl) phosphate via a phosphorothioate linkage
tttggctggtatctgaataa

SEQ ID NO: 1082 - RNA, 20 nt, synthetic construct
  source 1..20: mol_type = other RNA
  modified_base 1: mod_base = OTHER; note = 2'-O-methyl-adenosine with phosphorothioate linkage
  modified_base 2: mod_base = OTHER; note = 2'-O-methyl-cytidine with phosphorothioate linkage
  modified_base 3: mod_base = OTHER; note = 2'-O-methyl-adenosine
  modified_base 4: mod_base = OTHER; note = 2'-O-methyl-adenosine
  modified_base 5: mod_base = OTHER; note = 2'-O-methyl-uridine
  modified_base 6: mod_base = OTHER; note = 2'-fluoro-guanosine
  modified_base 7: mod_base = OTHER; note = 2'-O-methyl-uridine
  modified_base 8: mod_base = OTHER; note = 2'-fluoro-uridine
  modified_base 9: mod_base = OTHER; note = 2'-fluoro-adenosine
  modified_base 10: mod_base = OTHER; note = 2'-fluoro-cytidine
  modified_base 11: mod_base = OTHER; note = 2'-fluoro-cytidine
  modified_base 12: mod_base = OTHER; note = 2'-O-methyl-adenosine
  modified_base 13: mod_base = OTHER; note = 2'-O-methyl-adenosine
  modified_base 14: mod_base = OTHER; note = 2'-O-methyl-adenosine
  modified_base 15: mod_base = OTHER; note = 2'-O-methyl-adenosine
  modified_base 16: mod_base = OTHER; note = 2'-O-methyl-cytidine
  modified_base 17: mod_base = OTHER; note = 2'-O-methyl-cytidine
  modified_base 18: mod_base = OTHER; note = 2'-O-methyl-guanosine with phosphorothioate linkage
  modified_base 19: mod_base = OTHER; note = 2'-O-methyl-adenosine with phosphorothioate linkage
  modified_base 20: mod_base = OTHER; note = 2'-O-methyl-adenosine attached to (S)-12-(6-carboxyhexyl)-14-docosanamido-1-((5aS,6R,6aR)-6-( (((3-((2S,3R,4R,5R)-4-hydroxy-3-methoxy-5-(oxylmethyl)tetra hydrofuran-2-yl)propyl)carbamoyl)oxy)methyl)-5,5a,6,6a,7,8- hexahydrocyclopropa[5,6]cycloocta[1,2-d][1,2,3]triazol-1(4H )-yl)-13-oxo-3,6,9-trioxa-12-azapentadecan-15-yl (2-(trimethylammonio)ethyl) phosphate via a phosphorothioate linkage
acaatgttaccaaaaccgaa

SEQ ID NO: 1083 - RNA, 20 nt, synthetic construct
  source 1..20: mol_type = other RNA
  modified_base 1: mod_base = OTHER; note = 2'-O-methyl-guanosine with phosphorothioate linkage
  modified_base 2: mod_base = OTHER; note = 2'-O-methyl-cytidine with phosphorothioate linkage
  modified_base 3: mod_base = OTHER; note = 2'-O-methyl-uridine
  modified_base 4: mod_base = OTHER; note = 2'-O-methyl-uridine
  modified_base 5: mod_base = OTHER; note = 2'-O-methyl-cytidine
  modified_base 6: mod_base = OTHER; note = 2'-fluoro-adenosine
  modified_base 7: mod_base = OTHER; note = 2'-O-methyl-cytidine
  modified_base 8: mod_base = OTHER; note = 2'-fluoro-adenosine
  modified_base 9: mod_base = OTHER; note = 2'-fluoro-guanosine
  modified_base 10: mod_base = OTHER; note = 2'-fluoro-adenosine
  modified_base 11: mod_base = OTHER; note = 2'-fluoro-uridine
  modified_base 12: mod_base = OTHER; note = 2'-O-methyl-uridine
  modified_base 13: mod_base = OTHER; note = 2'-O-methyl-uridine
  modified_base 14: mod_base = OTHER; note = 2'-O-methyl-uridine
  modified_base 15: mod_base = OTHER; note = 2'-O-methyl-uridine
  modified_base 16: mod_base = OTHER; note = 2'-O-methyl-guanosine
  modified_base 17: mod_base = OTHER; note = 2'-O-methyl-cytidine
  modified_base 18: mod_base = OTHER; note = 2'-O-methyl-adenosine with phosphorothioate linkage
  modified_base 19: mod_base = OTHER; note = 2'-O-methyl-adenosine with phosphorothioate linkage
  modified_base 20: mod_base = OTHER; note = 2'-O-methyl-adenosine attached to (S)-12-(6-carboxyhexyl)-14-docosanamido-1-((5aS,6R,6aR)-6-( (((3-((2S,3R,4R,5R)-4-hydroxy-3-methoxy-5-(oxylmethyl)tetra hydrofuran-2-yl)propyl)carbamoyl)oxy)methyl)-5,5a,6,6a,7,8- hexahydrocyclopropa[5,6]cycloocta[1,2-d][1,2,3]triazol-1(4H )-yl)-13-oxo-3,6,9-trioxa-12-azapentadecan-15-yl (2-(trimethylammonio)ethyl) phosphate via a phosphorothioate linkage
gcttcacagatttttgcaaa

SEQ ID NO: 1084 - RNA, 20 nt, synthetic construct
  source 1..20: mol_type = other RNA
  modified_base 1: mod_base = OTHER; note = 2'-O-methyl-adenosine with phosphorothioate linkage
  modified_base 2: mod_base = OTHER; note = 2'-O-methyl-cytidine with phosphorothioate linkage
  modified_base 3: mod_base = OTHER; note = 2'-O-methyl-adenosine
  modified_base 4: mod_base = OTHER; note = 2'-O-methyl-adenosine
  modified_base 5: mod_base = OTHER; note = 2'-O-methyl-uridine
  modified_base 6: mod_base = OTHER; note = 2'-fluoro-guanosine
  modified_base 7: mod_base = OTHER; note = 2'-O-methyl-uridine
  modified_base 8: mod_base = OTHER; note = 2'-fluoro-uridine
  modified_base 9: mod_base = OTHER; note = 2'-fluoro-adenosine
  modified_base 10: mod_base = OTHER; note = 2'-fluoro-cytidine
  modified_base 11: mod_base = OTHER; note = 2'-fluoro-cytidine
  modified_base 12: mod_base = OTHER; note = 2'-O-methyl-adenosine
  modified_base 13: mod_base = OTHER; note = 2'-O-methyl-adenosine
  modified_base 14: mod_base = OTHER; note = 2'-O-methyl-adenosine
  modified_base 15: mod_base = OTHER; note = 2'-O-methyl-adenosine
  modified_base 16: mod_base = OTHER; note = 2'-O-methyl-cytidine
  modified_base 17: mod_base = OTHER; note = 2'-O-methyl-cytidine
  modified_base 18: mod_base = OTHER; note = 2'-O-methyl-guanosine
  modified_base 19: mod_base = OTHER; note = 2'-O-methyl-adenosine with phosphorothioate linkage
  modified_base 20: mod_base = OTHER; note = 2'-O-methyl-adenosine attached to (S)-12-(6-carboxyhexyl)-14-docosanamido-1-((5aS,6R,6aR)-6-( (((3-((2S,3R,4R,5R)-4-hydroxy-3-methoxy-5-(oxylmethyl)tetra hydrofuran-2-yl)propyl)carbamoyl)oxy)methyl)-5,5a,6,6a,7,8- hexahydrocyclopropa[5,6]cycloocta[1,2-d][1,2,3]triazol-1(4H )-yl)-13-oxo-3,6,9-trioxa-12-azapentadecan-15-yl (2-(trimethylammonio)ethyl) phosphate
acaatgttaccaaaaccgaa